United States Patent Application Publication US 2004/0123343 A1 - sequence listing, part 54

SEQ ID NO: 203659 - protein, 335 aa, Oryza sativa
  Clone ID: PAT_MRT4530_98821C.1.pep
MTVDLQNLCELTTLLLDGGLSSGNITELVEKLPRCYLSPLKYLSLQGNNMTGMLPNEISHLKSISFLNLKNNSISGPIAVGEFPLCLQSISLLTFLDLSRNKFYGALPVWIGDLVNLQYLQLSYNMFYGDIPNSITNLDSIRFLNLAGNNISGSSSTFDKININDTKTSHDINGACTGSLFLVADALHEHHHGRPNIAGATCVPHERDALLAFKEGVVGDPVGRLASWRTGEDCFRHWRGVRCSNLTGHVLKLHLRNTDGGEAAMSGKVSSSLLSLQHLRHHDLSMNNLQALPRFLRIAGEGPIPEFLRLRSAPGRRVIKFLGTASRTTALFVHH

SEQ ID NO: 203660 - protein, 752 aa, Oryza sativa
  unsure (1)..(752): unsure at all Xaa locations
  Clone ID: PAT_MRT4530_98822C.1.pep
MAEERESFESQWAPSDVTKENLKEMVAHGVLPAKEIIGWRPAFGEAFPTPDTHEAVVFSHFFYGGFSLPTSSFLGIRPHFSLFRHIFFLKPQPNKSKPCVVGGAGFQLRGTLSQKYFSMPFKTSNKGWHANWFYVQNPEPAFPEYSCLPPVYQGTWNSLPMGEEAAQVLALMDRMLKLKEQGLQGEQITRHFIKSRLAPIKERSRTAFEFDGKHDPNCEDPESLEFKVMKERMYKIFSNAIVVSYSHLLPVVPYNGFNPPPPEFALMKSDPPITQRRSPRRQTGQASGGPKIRSETQSNISRSTIQSDSCKRKLVLSDDEGDDAGKSSNKEATRKLPKQSNPKKKTSNRPMPKIRKSSRKPSDIDPSGKDSKPIDIETGPSKETEPTTEDHPSDNQPTTDNVIPSDEPPTGNQSAEAEIGXPNRDVPEVETQADSPLRKDTSNDPGSSSPIKTQESTRPQPKIITDFIRLFHLYEYXGSMIGDEEEVLRIRAAEDSRPPILRIHLRNEAKTATLERLVPHLGTLEATRNQLHEARELARKTEHDLRDRIAELQDSNFELSGSSKGNIVQAAKISQLGKQIQTLENDKAELARQRDSALKDVVDRKIKSQAQFDVLVNKIKRLDGARDKVANAATPLVQAMFFNNNGPSTFDASEIFDKLRVAPDTYFKNIKEAGSIGASLALAMTKSLYPKIDIDAIDGFADRTSEEAALDLINDEQKAADKIAGYVVERFQDNDLRPTGSDNSDDEKTDTD

SEQ ID NO: 203661 - protein, 755 aa, Oryza sativa
  Clone ID: PAT_MRT4530_98823C.1.pep
MVEERESFESQWAPSDVTVESLKEMVAHGVLPAKEIIGWRSAYDEAFPTPDTHEVMVFSYFFYGGFSLPTSRFFRWILDFYGISLHHLNPNSIVHIANFIHACEAFMGVRPHFALFCYIFFLKPQPNKSKPCVVGGAGFQLRGTLSQKYLSMPFKTSNKGWHANWFYVQNPEPALPEYSCLPPVYQDTWNSLLMGKEAAQALALMDCMLKLKEQVVVSYSHLLPVVPYNAFNPPPAEFALMKLDPPTAQRRSPRRQTGQAGGGPNIRSDSQPSTTQSANQSDFCKRKLVLSDDKNDDSEKVGSKGVTGKPRRQANPKKKTSSRPMPKIRKSSKKPSDIDPSGKDSEPTDMETGPSKETEPTAEDRPSDNQPATDNVETSDKPPTGNQSAEAGVGANQEPSTGNQSGTEQNNDISEVETQPDSPPKASAGANSGTNSPVRVQGPARPRPEIITEDKEVCLLKKTLGQATRLVNRIHLRNEAKTATLEKLVPHLGTLEATRNQLHEAKELARKTEHDLRDRIAELQDSNFELSGSSKVQAAKISELEKRIQALEKDKAELARQRDLALKDVEVQAAKISELEKRIQALEKDNAELARQRDLALKDVEDRKIKSQAQFDVLVNKIKRLEGARDEVANAATPLVQAMFFNNNGPSTFDASEIFDKLRIALDTYFKNIKEAGSMGASLALAMTKSLYPKIDIDAVDGFADGTSEEAALDLINDAQKAADKIVVDVVERFQDNDLRPTGSNNSDDEKTDTD

SEQ ID NO: 203662 - protein, 707 aa, Oryza sativa
  Clone ID: PAT_MRT4530_98824C.1.pep
MAYTSNAAYRKGAISKGTCGRLILEKTASAKHTIATAAVPSPQCQSRCGDVDIQYPFGIGANCSLAELFNVECKVQHGISKPFIGNVEVLNISLSRSTLRVLNGISTFCYNASGLMGGVHFRFNAKNTPFRFSDVYNKFTVIGCNTLAYIADDGGTGYQSGCFSQCRDLSGLVDGSCSGMGCCQTTIPRGMYYYNVTFDKRFNTSQISRFGRCSYAVLMEAASFNFSTTYINTTKFNGTNGGRVPMVIDWAIREKSCDIAKQNMTSYACLSSNSECVASTNGPGYVCNCSHGYEGNPYLPDPHGCHGVIIGFIVLMIIAFCGQLVIQRRKLTKIKKEYFRQHGGMILFESMKSKKGLAFTVFTEAELIHATNNFDKSRIIGQGGHGTVYKGTVKDNMLVAIKRCALVDERQKKEFGQEMLILSQINHKNIIKLLGCCLEVEVPMLVYEFVPNGTLFELIHGKNQGLQISFSTLLRIAHEAAEGLHFLHSYASPPILHGDVKTANILLDENYMAKVTDFGASILAPSDKEQFVTMVQGTCGYLDPEYMQTCQLTDKSDVYSFGVILLEILTGQVPLKLEGPAIQRSLSSVFLSAMKGNNLDSVLVSDIKGQESMPGRLGGLPELAKQCLDMCGANRPSMKEITDELGRLRKLSLHPWVQVDAEMETENLLGGPSTINSGLEIETSSTGYLGEERENLPMNPGSTYYAR

SEQ ID NO: 203663 - protein, 687 aa, Oryza sativa
  Clone ID: PAT_MRT4530_98825C.1.pep
MAEERESFESQWAPSDVIEENLKEMVAHGVLPAKEIIGWRPAFDEAFPTPDTHEVVIFSHFFYGGFSLPTSRFFRGILNFYGISPHHLNLNSIVHIANFIHVCEGFLGIRPHFALFRRIFFLKPQPNKSKPCVVGGAGFQLRGTLSQKYFSMPFKTSNKGWHANWFYVQNPEPALPEYSCLPPVYQDTWNSLQMGEEATQALALMDHMLKLKEQGLQGEQITRHFIKSRLAPIKERSRTAFEFDGKHDPNHEDPESLEFKVMKERMYKIFSNAIVVSYSHLLPVVPYNAFNPPPPEFALMKSNPPITQRRSPRQQTGQASGGPKIRSETQSNISKSTILSDSRKRKLVLSDDEGDDAGKSSNKGATRKLPRQTNPKKKTSSRPIPKIRKSSRKPSDIDPSGKDSEPTDMETGPSKETEPTAEDHPSNNQPDPDNVKPSDEPLTGNQSAEARIGVNQRIVINKQKEDEEVCLLKKALSQATRIVNRIHLRNEAKTATLERGNIVQAAKISQLEKQIQTLENDKAELARQRDSALKDVEDRKIKSQAQFDVLVNKIKRLEGARDEVANAATPLVQAMFFNNNGPSTFDASEIFDKLRVTLDTYFKNIKEAGSMGASLALAMTKSLYPKIDIDAIDGFVDGTSEEAALDLINDAQKAADKIAFDVVERFQDNDLRPTGSDNSDDEKTDTD

SEQ ID NO: 203664 - protein, 317 aa, Oryza sativa
  Clone ID: PAT_MRT4530_98826C.1.pep
MASSPRHSTHHPTLLLRRHYPNFCALAPLRPTRQLPSLPQQQLQQKQHVGHDPSPSEPTTAAASPATAAAAGALRVGIVGFGNFGQFIAGGIQRQGHAVLATSRSDYSGYCARHGIRFFATADELCEAGPDVLLVCSSILSTEAVVRAIPFRKLRPGTLVADVLSVKQFPRNLLLEILPPGFGIVCTHPMFGPESGKHGWSGLPFVYDKVRVAKEGDQAAKCEQFLSIFEREGCRMVEMLCEEHDRYAAGSQFITHTIGRILSQLNLESTPINTKGYETLLQLIDNLDRAFEKVKQMLYGRLHNVLRKQIEERVPIP

SEQ ID NO: 203665 - protein, 139 aa, Oryza sativa
  Clone ID: PAT_MRT4530_98827C.1.pep
FLVFITCFFFILLFIFTFFKARTGVDMQKTKGGKTKSHRAKRPAHQSGATSKADRTGGPQKKRRKGPIKVAKGGAKNRNGRGAQRKPPCGGDQEPDSPPHRCTQVHGPGPTDGRPWRGRRTLKSGGCQAGRNYEAPAVQ

SEQ ID NO: 203666 - protein, 189 aa, Oryza sativa
  Clone ID: PAT_MRT4530_98828C.1.pep
LRKKWFAILFPSPPPCESHTGRGFPPPLPTAGAGARPAPPSAAPALPQPFGLRRRCQGRLHLRCHASASAVAAAAARASASATTAEADSISADPLAEALVDVDNAASRRALEKAGFQQEAVLCNYCVVKGQLRDMVIYSFISTDHRRAWEVAVLELRRRRARVHGSLSLAARVCLCLCLGLRRRQGRLH

SEQ ID NO: 203667 - protein, 202 aa, Oryza sativa
  unsure (1)..(202): unsure at all Xaa locations
  Clone ID: PAT_MRT4530_98829C.1.pep
IYPFFLFYQMMLDLCNRMCWPHNPNHGIPQANRNQHSKQQHSFTQSIVPGNMQLISHQPGNPTPIHMHISPHDSMASSSHXSHSFLHYSFAXPFAIACPLVFLMAGTHTPLQQLLSSSSHXVQTCXXGLNCLLNKQVQTLRPXHPCLPETPHSNICLKAXSXTWXQCLPLLSQVXAIWXTXWSRDXXPTHSWTXTPWVSRMV

SEQ ID NO: 203668 - protein, 108 aa, Oryza sativa
  unsure (1)..(108): unsure at all Xaa locations
  Clone ID: PAT_MRT4530_9882C.1.pep
IXXVVAXXXXIHLPKRXXGAXFKKRAPKAIKEIKDFATKAMGTSDVRVDPQLNKKVWEQGVKGVPYRIRVRISRRRNDSEDAKEKLYSYVQAVNTKNPKGLHTVLVDE

SEQ ID NO: 203669 - protein, 125 aa, Oryza sativa
  Clone ID: PAT_MRT4530_98830C.1.pep
MGLVPKLEKIMWTFTGMNSSFSGIDNIMQPSEILKELEFNGESLPNQVKEAIDKHKDKIHYTYYKWEIHEKTQGNAEANYTNMEALLKISRLHHHDTREGKKYSAVLLFAFLVLISADGNQICCP

SEQ ID NO: 203670 - protein, 85 aa, Oryza sativa
  Clone ID: PAT_MRT4530_98831C.1.pep
WMPDLASRWMMISFLLASSPGDRSSSVLDLPPMLASIPVVLISESPAEFCTSGAERPVHCTSPLRHHVGICLIGYDLIKYDDFWF

SEQ ID NO: 203671 - protein, 107 aa, Oryza sativa
  Clone ID: PAT_MRT4530_98832C.1.pep
RRSPALLPPPCRRRCSPIPEHRRRAAAPKPPVAARPSSRRIAPPLPNPGAHRGAPQPRRRHLFPRPRTASRANAEPCRHRLPLRNRLRHHAPKPRSPPSPRALSPSD

SEQ ID NO: 203672 - protein, 337 aa, Oryza sativa
  Clone ID: PAT_MRT4530_98833C.1.pep
MADKGLFANDGSFMERFKQMQEKEKEKAAAASSSAAAAAKATNPKPVVVAANTPSASKRPLELKGGEVKKAGSISSGAKLAFSLKKNKVAVAPVKFAADDEDEEDVGADREEPVKRQKYAQPEAPASVAALSGVVGNHLFTFVPVIAFFSCDIVSNTFVICLLVTMGYIIVHLQLDWNFGFNHWMYFDYNESTIEIVAPSPPNDMTVKQVADELENFDAITQEELVKSSWPRSTRCCLHKNATKEAAEKAKIQADNIGHKLLSKMGWREGEGLGSERSGRADPIMAGDVKKDHLGVGAVQPGEVTSEDDIYEQYKKRMMLGYRYRPNPLNNPRKAYY

SEQ ID NO: 203673 - protein, 75 aa, Oryza sativa
  Clone ID: PAT_MRT4530_98834C.1.pep
KTMGPLITGEPIFSLILFFCPTIFTMEINFSPLINGSGQNPLHRKKIGNNLSKESIVQIILPKRIILMPQFMVFT

SEQ ID NO: 203674 - protein, 278 aa, Oryza sativa
  unsure (1)..(278): unsure at all Xaa locations
  Clone ID: PAT_MRT4530_98835C.1.pep
VSDKLSNFVAKNGRQFENVTRQRNTGDTPFMFLLDKNCSNYKYYEXRLAEEEMLLAQSKEAQALKHARSSTPSFRAPIAQHRSLFEQKTYYHTPALAFVGAYEGSSFQGNSSGYGEPPKDPVALMEFYMKKAAQEERKRPPKQSKDEMPPPPSLQAPSSKKGHHMGDFIPQEELEKFMARCNDAAAQKATKEAAEKAKIQADNIGHKLLSKMGWREAEGLGSERSGRADPIMAGDVKKDHLGVGAVQPGEVTYEDDIYEQYKKRMMLAYRYRPNPLNN

SEQ ID NO: 203675 - protein, 284 aa, Oryza sativa
  Clone ID: PAT_MRT4530_98836C.1.pep
MEADASHTPTTSSSVSVSFSSSSLSTSSSTSSLVDNGAQDRPKSSKPKHAAKKRKRAAAEEPANAAHGAGEDTSSCSTDDNAAASGKAQAGGGGGGVDSSSTCTAASAPRSGFKHPSYRGVRRRSWGKWVSEIREPRKKSRIWLGTFPTAEMAARAHDVAALAIKGRNAHLNFPDSAHELPRPESTSPADIQAAAAKAAAEVRCEEESSPSSSPTAEQPEEEAACPDTVHADGGQDNALFDLPDLLLDLRDGLWWSPVWPAALAAEEYDGGDAVVLNEPLLWAE

SEQ ID NO: 203676 - protein, 269 aa, Oryza sativa
  Clone ID: PAT_MRT4530_98837C.1.pep
MQAMQRLVLCLVVSMAIAASAQGPTAAPAAPAPATPAAPATPAAPAPASTKTTNITGVLAKAGQFNTLIRLMRSTGAAEQIDNQLNSSRNGLTVFAPTDNAFTSLPSGTLNSLSDQQKNSLVQYHVLSTLIPMSQFDTVSNPLRTQAGSNSPGQYPLNVTAEGQQVNISTGVVNATVGNALYTGDNLVVYQVDKVLLPMAIYSTPAPAPAPLSPATKKKGKTPATSVADAPEAADATPDATTPSLAAARVTAGAGVGVVLALASVWLGL

SEQ ID NO: 203677 - protein, 110 aa, Oryza sativa
  Clone ID: PAT_MRT4530_98838C.1.pep
NIPPPKYFIQNKMLLCHPPFNNKSFLDHFQKTKGPQICPPFPPPRTPKKTKALRGPPPKKNHVANFPKKSLLPSCPKAPPFSKTQVGDFTPKLCLWKPPLNKMAQNGGGS

SEQ ID NO: 203678 - protein, 74 aa, Oryza sativa
  Clone ID: PAT_MRT4530_98839C.1.pep
MAAAAPRARKADDDGAVDGGVGNARRQGSLGSRGQPAAGPAGGDDGGVVAPAELYLGSGQWGRKQDLTEKVRAK

SEQ ID NO: 203679 - protein, 518 aa, Oryza sativa
  Clone ID: PAT_MRT4530_9883C.1.pep
MAASSFLVECLSWLVVVLFSLYIFQLLRDARRRLPPGPWPPKPLVGDLLDLGEDGKQHRTFLRLAGRYGGLMCLRFGMVPHVIVSTPDALRAVFAAAGAGGGGGGEGKKVDGIAGLPSLDVLSAMGHRAHTIFALPSQDGKWRALRKFAAAEMLAPRRISSAAAGAQLQTKIVEALRREVSGHAARGAAVVFRHAVLDSILSLLLGVLYSTDLEREERAMFRDLIEEIVGMLGTANVSDVFPPVAALDLQGLRRRMTDLLTIMYRHFDDQVALRRRSRDAGEARKNDVLDTVLDKEESEWKQEGSLLSHDVMRVLLSDLYGAGASTTAALIEWGMVDLIQNPEVMTKVREELTNVLGDKLVMDESDIARLPYLQAVVKETLRLRTVVPLVPRKAEVDIEVNGYRIPKGTNVILNAWAINRSADAWSEPDKFIPERFLGGETRGYLGQDFEMIPFGLGRRICPGMPLAQKLIPLIIGTLLHRFEWELPADAKEGGIDMTEKCGVVLSLVNPLKAIPKEI

SEQ ID NO: 203680 - protein, 141 aa, Oryza sativa
  unsure (1)..(141): unsure at all Xaa locations
  Clone ID: PAT_MRT4530_98840C.1.pep
STVRCVPSHSAFCLPPPPSASSGRRRRQARSTPPLRVTSPLPTSPRDALASSPHRARCFFPPHPPARAPGAGPPQAALASPHXPQREPAAGPPSSPRCSRSAAASPPHSKFAARPTWPVPPSPAMCEAAAASQTTDPLPLP

SEQ ID NO: 203681 - protein, 91 aa, Oryza sativa
  unsure (1)..(91): unsure at all Xaa locations
  Clone ID: PAT_MRT4530_98841C.1.pep
MEENRHQFRQXINWTMSRIRFMHEWAKNSKLTRXIGPKFTSLHKGAMEETASQRWARMAXPMVRPNPSXTPWMQGSXGRPGLLPNDGWRAL

SEQ ID NO: 203682 - protein, 428 aa, Oryza sativa
  Clone ID: PAT_MRT4530_98842C.1.pep
MVPVGSIECLRKRCRQLRVLIHVNDHRKAVVVLHAGEDGKPDHVLVQNVSPEGEASVQSTYRIDVSGETPESQAEMLNDWYTSFRMDTTGVLYDSDQNEEPLLLVQTDQPAAIGKRKKFTFPDQRKRVKTMTKKDLESYFHITQKSAAHIGLSIGTTALKNLCRANDLPRWPYRQIASLDNKFNNNLKKQITGWNLGKAVQGVTKAFKLRKEKEEFYQKIMSSMPEQLQSIDEIVNSLPEADDDIDIEDDEDNDDVIEDNDDDNSDENYTSSNVPSDGVTAGGGAGSGKLPMVPLGSIECLRKRCRQLRVLIHVNDHRKMVVVLHAGEDGKLDHILVQNNSPDAEASVQSTYRINVSGETPELQAEMLNDWYTSFRMDTTGVLYDSDQNGIDEIVHSLPEADDGIDIEDDEDNDEVMEDNDDENSDEN

SEQ ID NO: 203683 - protein, 345 aa, Oryza sativa
  Clone ID: PAT_MRT4530_98843C.1.pep
MATGGSSSSSNVPSGGAAAGGGAGSGKLPMVPVGSIECLRKRCRQLRVLIHVNDHRKAVVVLHAGEDGKPDHVLVQNVSPEGEASVQSTYRIDVSGETPESQAEMLNDWYTSFRMDTTGVLYDSDQNEKYPKVIYGVPRGHPGGDVPRSLAILPPAPKKNQHGKAPATESNSSLVEEPLLLVQTDQPAAIGKRKKFTFPDQRKRVKTMTKKDLESYFHITQKSAAHIGLSIGTTALKNLCRANDLPRWPYRQIASLDNKFNNNLKKQITGWNLGKAVQGVTKAFKLRKEKEEFYQKIMSSMPEQLQSIDEIVNSLPEADDDIDIEDDEDNDDVIEDNDDDNSDEN

SEQ ID NO: 203684 - protein, 246 aa, Oryza sativa
  Clone ID: PAT_MRT4530_98844C.1.pep
MAIVNKEKQHPQQQHNNLTIKEPLTTVYDGDGGKEVKLDFLFADFMDPYLGGSPELARFPHADSVVPNHNGSAGPAMELGFAGGGGAAVKPSYSSYTAASLGNSGSSSEVGLVPDAICGGGGGGIIELDFAQSKAAYLPYASTPSHSMCSSMGGGVAAPEMSDCAAAAAGRAYAAEGRAARLMRYREKRKNRRFEKTIRYASRKAYAETRPRVKGRFAKRADDHDAAAPPPQIMLDFAGYGVVPTF

SEQ ID NO: 203685 - protein, 738 aa, Oryza sativa
  Clone ID: PAT_MRT4530_98845C.1.pep
MASTTTKNALLLLLLLLLLFPLLHSSLADVAAAAPSSASAAEVDALMELKAALDPSGRLLPSWARGGDPCGRGDYFEGVSCDARGRVAAVSLQGKGLAGAISPAVAMLPGLTGLYLHYNELAGAIPRQLGDLPMLAELYLGVNNLSGTIPVELGRLPALQVLQLGYNQLSGSIPTQLGQLKKLTVLALQSNQLTGAIPASLGDLPELARLDLSSNRLFGSIPSKLAAIPKLATLDLRNNTLSGSVPSGLKKLNEGFHFDNNSELCGAHFDSLKPCANGDEDDNEEGSKMARKPESTNVKPLQAPQTMNVNRDCDNGGCSRSSSSSTTLSSGAILAGTIIIIGGAAACGISVISWRRRQKQKVGGGGTVESLEGRASSSNASSSLINVEYSSGWDTSSEGSQQGLRLSPEWSPSVRYNMEEVECATQYFAGANLLGRSGFAATYRGAMRDGAAVAVKSIGKSSCKAEEADFLRGLRAITSLRHDNLVALRGFCRSRARGECFLVYEFMANGSLSRYLDVKDGDVVLDWATRVSIIKGIAKGIEYLHSSKANKAALVHQNICADKILMDHLFVPHLSGAGEHKLLADDVVFSTLKDSAAMGYLAPEYTTTGRFTDRSDVYAFGVVVFQVLTGRKAVSSELRLLGGGGGAEYSGKLDDLVDPRLGGRFSRPEAAKLAGIALLCTSESPAQRPAMAAVLQQLGATQVPVDDLLCHTAAAGVEGSVFDDERIERSEEALQLWH

SEQ ID NO: 203686 - protein, 388 aa, Oryza sativa
  Clone ID: PAT_MRT4530_98846C.1.pep
MAPVATTFLPTASNEATLRPSFVRDEDERPRVAYNQFSDAVPVISLQGIDEAARAEIRARVAGACEEWGIFQVVDHGVDAGLVADMARLARDFFALPPEDKLRFDMSGGKKGGFIVSSHLQGEAVKDWREIVTYFSYPVKSRDYSRWPDKPAGWRAVVEQYSERLMGLACKLLGVLSEAMGLDTNALADACVDMDQKVVVNFYPKCPQPDLTLGLKRHTDPGTITLLLQDLVGGLQATRDAGKTWITVQPIPGSFVVNLGDHAHIMHLLGNVNLQYLSNGRFKNADHQAVVNSDCCRLSIATFQNPAPDAMVYPLAVRDGEEPILEEPITFAEMYRRKMARDLELAKLKKKAKEQRQLQQAALPPPPPTQVAAELAAQKPKSLDEILA

SEQ ID NO: 203687 - protein, 121 aa, Oryza sativa
  unsure (1)..(121): unsure at all Xaa locations
  Clone ID: PAT_MRT4530_98847C.1.pep
PTRPPTRPNPLCSARSRCRRRRLGRARVDVGRPIGAGGEHNGRSEMAASSTTCRTGRIRRGMAMTTAGDDDLGDDGTATSAGDGSGDGADNGWRRXDDGLTTARRSATTTSETTGPAAGDG

SEQ ID NO: 203688 - protein, 47 aa, Oryza sativa
  Clone ID: PAT_MRT4530_98848C.1.pep
MEQKRVDEESDGEGDVYDGERAEWRGNFDRVLLWELSNIDTSSIGHL

SEQ ID NO: 203689 - protein, 100 aa, Oryza sativa
  Clone ID: PAT_MRT4530_98849C.1.pep
MAARGRADGRSALMALPPHMDAAMHAHAHEVFVSRARGELLLVGTCVRVAPLALPPLPAVRSASASVARLAACAAPPPPRLAAASGHHPVHVSAASCVPP

SEQ ID NO: 203690 - protein, 170 aa, Oryza sativa
  unsure (1)..(170): unsure at all Xaa locations
  Clone ID: PAT_MRT4530_9884C.1.pep
DAVAYNSMMSGYIDGGRNNEALSLVWTMLEAGVRPSGFTFSIILSAVRVARHGVQVHAAAVRHCFAHQNSVVGNALINMYRRVGLLEYAVQVFWSMNGHDIVSWNSVMSVYRDDGQRRQVFECFRMIRSHGLXFDECSLSTVLSACIDAEDSSKGDQLLTHCVKLGLLRN

SEQ ID NO: 203691 - protein, 333 aa, Oryza sativa
  Clone ID: PAT_MRT4530_98850C.1.pep
MASRSLFALLVVAAAMCASVASALRSRAATDPNMEVKFDFTPFLIQYRSGRVQRLMGTTVVAPSLDVRTGVVSKDVVVDRSTGLAVRLYRPKHRGGRLPVLIYFHGGAFVVESAFDPVYHNYLNALAAKAGAIAVSVNYRLAPEHPLPAAYDDAWTVLRWVAADMQRGADSWLARRGDASRLFVAGDSAGGNIAHNLAMRAGQHGGGATIRGVALLDPYFLGKYVDPTAQRAWGFICAGRYGMEHPYVNPMALPAASWRRLASSRVLMTVSDLDRLGPWQRAYVDALRGSGWPGEARLYVTPGEGHCYFLNNLEPPKAAMHMDAVVAFINRDT

SEQ ID NO: 203692 - protein, 56 aa, Oryza sativa
  Clone ID: PAT_MRT4530_98851C.1.pep
MEMISPIKADEDVGGGKNNDTNQSNNGDVKADEAKVLVMMSVTIIHQTVEKISKLE

SEQ ID NO: 203693 - protein, 88 aa, Oryza sativa
  Clone ID: PAT_MRT4530_98852C.1.pep
MPSLGTPHPRGTNHDEIGATRPLLPRQCRGELGLLNLHQQRQQEGWCMQRGCFMVCRFSEAVDRLGQLLAEAAFGKSYNWVKLPQTGL

SEQ ID NO: 203694 - protein, 481 aa, Oryza sativa
  Clone ID: PAT_MRT4530_98853C.1.pep
MAGGGGNSLPSPSCGDDKKRRVCYYYDPGISTVDYGEGHVMVPHRVTMAHNLVAAYGMLGDMRRLRTAPATAAELADFHDEGYLALLQDLTPDGCGGDDGVGDMARARGIYAVEGKGGGRGVDNPVFDRLWDYCLRYSGGSLAAARTLGSGTADIAINWSGGMHHACRGGARGFCYVNDIVLAIRELLAHFRRVLYVDIDVHHGDGVQAAFEASNRVMTVSFHQHGGGFFPGSGAVADVGKKGPGRYCALNVPVSVGIGDEEYHRLFEPIMARVMEVFQPEAVVLQCGADSLAGDRLGELNLTTRGHAQCVSFIRSFNLPLLLLGGGGYTINHVASCWCNETAVAIGKEIPNDIPKHGFDVFYKNQEYKLHYKLETKHLHRNRNTANSIDGIRMAAMENLSKLKLEAAASVQFEERRHRSINVGDLYYDPREQEEEEESPTARLHRKLYFEPTGDQESPYTKHRCNVQPGESSSRKQRKLK

SEQ ID NO: 203695 - protein, 109 aa, Oryza sativa
  Clone ID: PAT_MRT4530_98854C.1.pep
KTPNGSLKGEKSKTGPKSPKTTTGQSPTKTQGGLQSKAGFFRPTGRERERSKNGPRGGVPAHKKTPGGGRNKIPGGGAPLYPGGGGIKISREVVIDKPPPLPFYPPPPP

SEQ ID NO: 203696 - protein, 196 aa, Oryza sativa
  Clone ID: PAT_MRT4530_98855C.1.pep
MARRRRTEEGDGDERVDDEGMAPMIFGLDEEADAGGLGAADLTTMMTGNTSSGQERRPEEGDSDGVTFQGSSLEEKVQPRERATRLPASFGLREGDAGDKHSEARPSAATARAGSAQLDGEGLPKLEDNDVLDVGVPGAPAGLGRNGGEAGEEEVAAKRMVATPGSEDVPTAGEGRSELRNGSDVKRRRRGGQGER

SEQ ID NO: 203697 - protein, 99 aa, Oryza sativa
  Clone ID: PAT_MRT4530_98856C.1.pep
MEGCMPSDANYAPLTPVSFLERAAVVYGDRTAVVSGGREYSWRETRERCLAGASALARLGVGRRDVVAVIAANIPAMYELHFSVPMAGGVLCTLNTRHD

SEQ ID NO: 203698 - protein, 561 aa, Oryza sativa
  Clone ID: PAT_MRT4530_98857C.1.pep
MEGCMPSDANYAPLTPVSFLERAAVVYGDRTAVVSGGREYSWRETRERCLAGASALARLGVGRRDVLSTRHGLIAGQVAVIAANIPAMYELHFSVPMAGGVLCTLNTRHDAAMVSVLLRHSEAKVFLVESQFLAVAHDALRLLADAKAKFPLVIAISDTGDSSSSDGGGLEYEALLRDAPRGFEIRWPADERDPISLNYTSGTTSRPKGVIYSHRGAYLNSLAALLCNDMTSMPVYLWTVPMFHCNGWCMAWATAAQGGTNICVRNVVPKVIFEQIVRHGVTNMGGAPTVLNMIVNAPASERRPLPRRVLISTGGAPPPPQVLAKMEELGFNVQHGYGLTETYGPATRCVWRPEWDALPLAERARIKALQGVQHQMLQDVDIKDPVTMASVPSDGRAVGEVMLRGNTVMSGYYKDAAATEEAMRGGWLRTGDLGVRHPDGYIQLKDRAKDIIISGGENISSIEVESVLFGHHAVLDAAVVARPDDHWGETACAFVTLKDGASATAHEIIAFCRARLPRYMAPRTVVFGDLPKTSTGKTQKFLLREKARAMGSLPMQSKSKL

SEQ ID NO: 203699 - protein, 222 aa, Oryza sativa
  Clone ID: PAT_MRT4530_98858C.1.pep
TSFFRYSGLSQQHKQKGGAANSTARIHTSRFQLLITNRRGLSVGHARLPLPFLCTSKLGTSPENSDHNSIAGTFPAPEQLGHLSVVDHILWPLSHESEKLLLFNSIPLAEQRAHGKYPMMQNQVQSCFIVFGDYIRKKKGINRDYWENSMVRHWDRGGFDKGIDLKSRVCVGCEGIGWSVHWLRWIGQRIKDTADRGNAIDSDEDGFKAVSRIVQSALQGLP

SEQ ID NO: 203700 - protein, 77 aa, Oryza sativa
  Clone ID: PAT_MRT4530_98859C.1.pep
TRRRQLVPTVSVGANDTARVVVLFIFPPDIGHVHMVSLHMLARIDDVMRRYVVDVHGIRWPSGSCTRTRLRCLIKRS

SEQ ID NO: 203701 - protein, 64 aa, Oryza sativa
  unsure (1)..(64): unsure at all Xaa locations
  Clone ID: PAT_MRT4530_9885C.1.pep
RAYNNSFVGIYKWILVLYLGILRVWKYLDAIFLCTXSLLHNLLIFSPIQRIWIFPPEMVLTMPG

SEQ ID NO: 203702 - protein, 184 aa, Oryza sativa
  unsure (1)..(184): unsure at all Xaa locations
  Clone ID: PAT_MRT4530_98860C.1.pep
MGATVAGKPRHNKANGGHREVEKATAILTNTYATTDSEGXWPATSSEGRRAAATEGWKAFTSQLRTQRRRRRSLATTEGVAGPRRRSKRRGELVLNGDEGLPVVFSFGEMAAGLPLDLAEPREVATLTCDGRGDGARRLDRRPEVERXGERREGVSGDGGRRDLRGWVWCLDYWVSLFGVICCG

SEQ ID NO: 203703 - protein, 34 aa, Oryza sativa
  Clone ID: PAT_MRT4530_98861C.1.pep
MSVIARVSRYRRGCSSPSIPEAPLPAPWRRLARP

SEQ ID NO: 203704 - protein, 65 aa, Oryza sativa
  Clone ID: PAT_MRT4530_98862C.1.pep
SVWAMQLSCPSLWIDPQVLFVYMLVCHIWMSQLVYGSTVSCACLCLPCHVSFLLSTSCSHECSYI

SEQ ID NO: 203705 - protein, 79 aa, Oryza sativa
  Clone ID: PAT_MRT4530_98863C.1.pep
WTPSPVLREPASLRPPSFARRSWNLDPRPPVAPPALPALAARVAGAGCPPGTPRPAVSFQLTAHLATAYACTLKNLRFR

SEQ ID NO: 203706 - protein, 55 aa, Oryza sativa
  unsure (1)..(55): unsure at all Xaa locations
  Clone ID: PAT_MRT4530_98864C.1.pep
KRRRTGKKGRKGRGGRPHRRXRQRPAAGNEGGGEDRRCRGVDERRXHLRKERRGI

SEQ ID NO: 203707 - protein, 375 aa, Oryza sativa
  Clone ID: PAT_MRT4530_98865C.1.pep
MVTPLSVLLAAAAGGGFDRRDRSRVVGGGGGGREGWEMDEVLAQISEGFRLAGELMSELAATQNDPDYLAARCHAIAGAYAAAARVLQGARHGGGGVGAASTSFGGEGYLHHQHRQQRTSSAFRIACQVMALPLCTQVTRGFTHNYEYSTRRESGEKVTVMVAAQRTGNTEQPPDDGYTWRKYGQKDILGSRYPRSYYRCTHKNYYGCEAKKKVQRLDDDPFTYEVTYCGNHTCLTSTTPLLTLPAAAATSVTNSPTAAAVLGQDFVMAPAADQQPPQHQQAQPPLSTSIHLGIGWPMTPASLAGAVGEGSTSTTATAPQVTTMGATAAGGGGAAARDADHYPVADLADVMFNSGGSGSSSIMDGIFSSHDRRDN

SEQ ID NO: 203708 - protein, 51 aa, Oryza sativa
  Clone ID: PAT_MRT4530_98866C.1.pep
ILDPATEIHPMIHPISLECPMSHHREKTCQPVENREMDCVVLRPGFSLVEK

SEQ ID NO: 203709 - protein, 275 aa, Oryza sativa
  Clone ID: PAT_MRT4530_98867C.1.pep
MAVRCCSSMASASVVLFFVVVGMSASMVSGCDRCVRRSKAGFRDSSIALNAGSCGYGSLAASFNGGHLAAASPALFRGGVGCGACFQVRCKDGKLCSTAGAKVVVTDEARSTNRTDLVLSAAAYAAMARPGMAAQLRTRRAVDVEYKRVPCEYAAGRNLSIRVEEKSRPPRELSIRFLYQGGQTDIVAVDVATVGSSNWKFMTRDYGPAWSTAQAPAGPLQFRVVVTGGYDGKWVWADGEVLPRRWTAGRVYDAGVQIADVAQEGCYPCDTQEWK

SEQ ID NO: 203710 - protein, 58 aa, Oryza sativa
  Clone ID: PAT_MRT4530_98868C.1.pep
AFRRAATWTDTLAFAEPDTAYRQLVTSFMHVASYRLLMCVIRLLIHQWGRSCGRTSEG

SEQ ID NO: 203711 - protein, 128 aa, Oryza sativa
  Clone ID: PAT_MRT4530_98869C.1.pep
MHPLVGALVAGARERWWCRGEGGAAVRHAVAWAGALALAVSVASFAPEAAFVWALTGGGGGGGSGELCAAGAVRVPLDGGGDFVCVPARMAVRSGADMIVPPAFAGLAVGASACFVRALAIGRRLDDY

SEQ ID NO: 203712 - protein, 195 aa, Oryza sativa
  unsure (1)..(195): unsure at all Xaa locations
  Clone ID: PAT_MRT4530_9886C.1.pep
MEVFDEAAVVVAAPPPPQPECGAAAAVVGGEPGWSSPSPAASPEFEFWMVGKNPSSFQSPALLTADELFSDGIVLPLRTLQQVPSGEGDGEGEEGEGEXMPPPWSPLICRRRRRSGSRSPGAPRRTPDLPAVTFKWKDLFKATGGGESKDRKKVERRVSSVGGNGELININIWPFSRSRSAGHSAAGSRHRGGGS

SEQ ID NO: 203713 - protein, 833 aa, Oryza sativa
  Clone ID: PAT_MRT4530_98870C.1.pep
MSAVVSSPTSRLPLPCHSPPSARRSVRRWWWRCHQLTRKEEGSKIILCRLKNDTRSRNLLSDDKIAKPTLRAAFENTPPGEWQIVQNPTTQQSSHPETADPLSASRRRIPTRSLPLNRRRPHPRQRRRRRRRRIPSNAIAPRRSRIPDPRRIPDPRRNSRIIGLPSIDGPAAPSAPSLRRSIVVPTSKVNLLRVPHAATDPRTRQPCKPSILPVNKKYTVHSGRLTAIRFKSNGRYRPYTSTELALYYAPSPTPASPDLSRSPQTSPSAARGFRSTRSAMAELAAGGDQRAALLAAATLFPPPPDGARFSYGTAGFRAEGAAMGPAVCRAGVVAALRSAKLGGAAVGVVITASHNPVRDNGVKIVDADGGMLSQDWEPFADALANAPNPDALLQIVLQFAKDEDIKLGGSHSAQVLLARDTRPTGEYLLDVAVKGVNAVIGAVAVDMGILTTPQLHWMVRSKNKGLKSSETDYFSQVIDSFRCLLELVPKDKEADVINNRLIVDGANGIGGLKLEEIKAKISGLDIHVRNSGKGEGILNESCGADFVQKEKVVPLGFGPEDVGFRCASFDGDADRLVYFRIVSSSDTRIDLVDGDKILSLFVLFIREQLDIINGKDNKGNEVLPTRFGVIQTAYANGASTDFLKNIGLEVVFTPTGVKYLHKEALKYDIGIYFEANGHGTVLFSDHFVSQLESLTSSSQHQAAMRLLATSQLINQAVGDALSGMLLVEAVLQYKGWSFQNWCDLYTDLPSRQLKVKVQDRNSIVTTDAERRVCQPNGLQELIDGEISNYSHGRCFVRPSGTEDVVRVYAEASSEEAADCLAKRVAQHVERILG

SEQ ID NO: 203714 - protein, 195 aa, Oryza sativa
  Clone ID: PAT_MRT4530_98871C.1.pep
MVAVAGMLLEEPSTHATLLGHTEGPQSSRGHRRGARTPSSSPAVILSLHHGGVVMSTDLLALIASLRQDRCHSSSGLMQSVRAAAEVVVLSVHDAFSLSRRSVKVQCPYIIVEPFVMPSGHPFVTSERHCLVPVHRHQAEVVVSSIHNVFLSAAPRLRDAIRPRCPSPRQVGVVVLSSRQDEIPPVRDALPLRGD

SEQ ID NO: 203715 - protein, 112 aa, Oryza sativa
  Clone ID: PAT_MRT4530_98872C.1.pep
LYCNRCLLELVPKDKEADVINNRLIVDGANGIGGLKLEEIKAKISGLDIHVRNSGKGEGILNESCGADFVQKEKVVPLGFGPEDVGYRFARFDGYTYLLGYFRIVFLSDTMF

SEQ ID NO: 203716 - protein, 235 aa, Oryza sativa
  Clone ID: PAT_MRT4530_98873C.1.pep
MAFNLMLKILQISHESSHSIGFNEGVTDYLANIRVHFLRSHHSTVGKVSKMEEKSSAMSNIAPVAPTRITRYDKDDKHKPVIVCALAALPIPSQPPKASQERKRQRRTFWTKCATCKEKNKFPITNLACQVVCPACTETFTAIEVARPRNTSLYCKEKLESSSSVAANSSLQSTAVTPIADVAYHPSNIQGKRKDGEVKISEAFPKPAVEKLLQARMKEILEKKLNDRQAKDEGQ

SEQ ID NO: 203717 - protein, 78 aa, Oryza sativa
  Clone ID: PAT_MRT4530_98874C.1.pep
VGGGFPREVGVFFGGALRGQFSFTMRGGAFFFPARGFLVSRGFPSCEDPFSHPPGWGVFCPWMVPSIWVALNKKKNGR

SEQ ID NO: 203718 - protein, 273 aa, Oryza sativa
  Clone ID: PAT_MRT4530_98875C.1.pep
MANASLQSFLLHHHHSFLSNGIHEGSSPSIILKLTTNSNSSISFKLFSNTTSSSSSSVTTTASTPNSPVTPAPVTASSPPPPSLELLGAQLAERDYRQADETTRALLIELAGEPARRRGYVFFSEVQFISADDLRAIDALWQEHSGGRFGYSVQRRLWEKSRRDFTRFFIRVGWMKKLDTEVEQFNYRAFPDEFIWELNDDTPEGHLPLTNALRGTQLLGNIFTHPAFEEEQEDELAAEENDTPDNTGQSKDGSKGKERPKFMRDFFKPDYSF

SEQ ID NO: 203719 - protein, 36 aa, Oryza sativa
  Clone ID: PAT_MRT4530_98876C.1.pep
LVVDMHNSYEVILASRVTPALYPRSALLQSHRVSLG

SEQ ID NO: 203720 - protein, 69 aa, Oryza sativa
  unsure (1)..(69): unsure at all Xaa locations
  Clone ID: PAT_MRT4530_98877C.1.pep
YYXKKSLILNKLFAXTXTLIHTILLLINKXXFFSXIQGLTLYHYSPFLKSSXXPILLPNTIIPXKTSXL

SEQ ID NO: 203721 - protein, 74 aa, Oryza sativa
  Clone ID: PAT_MRT4530_98878C.1.pep
TTYTYINNYDDMLPLINSSPITQEMLRCTSFHRIIGAYHACMRRHVDGGDDRSDRRKEKKLMPGENGERKNRTD

SEQ ID NO: 203722 - protein, 269 aa, Oryza sativa
  Clone ID: PAT_MRT4530_98879C.1.pep
PAGSSRRKSPEDPSERFLKELRYDLETVYVGQMCLSWEFLRWQYEQAHDLPESDPYHSHQYNQVAGEFQQFQVVVQRFVEDESFKGPRLPNYINNRCVLRNLLQVPVIKEDSLKDRMEDQRKGNYVITSEELEEIMEECMRVFWEFIRSDRVETTSVLKGLSSTHVELQDPLDHDLMMHIDSTLQKKEKRLKDLLRTGNCIVKKFKKPKEDTLNQSLFFSQVDMRLVARVLRMPRITSEQLQWCKAKLDKIALVDRRIHREASFLLFPC

SEQ ID NO: 203723 - protein, 144 aa, Oryza sativa
  Clone ID: PAT_MRT4530_9887C.1.pep
ANPSSEDRESLPARGIAGGWIPSSAPGGQMGEPPGGGGLPPRREASRRWLVRFEAAEGGGGGGERRRGVSRVVWRGANGGVCVRVWGASPRRNAEAVVSCAPHHEERGGRGKGKNPIMTRIGFDRAAWDQLGPPESMVVGPPDR

SEQ ID NO: 203724 - protein, 126 aa, Oryza sativa
  Clone ID: PAT_MRT4530_98880C.1.pep
MDHGHVNLLGKNDRSSGCGIQCGCLPGFRGVPEVKVAMGSPQEHFSCGGQRPPDECESERGGVFEWTEEEDPACFAMDLERLRQSDLTLGMDGENCHVLINSSRNKNHLLKGIIELIKIRKEIGKH

SEQ ID NO: 203725 - protein, 78 aa, Oryza sativa
  Clone ID: PAT_MRT4530_98881C.1.pep
QEDHHNQATVQENRWNTLKYITTIHEKQVTREGIERTMIGAPLQNGHIFFPVEKSYTVLRTQTPEDTSLIQTLEKLQG

SEQ ID NO: 203726 - protein, 350 aa, Oryza sativa
  unsure (1)..(350): unsure at all Xaa locations
  Clone ID: PAT_MRT4530_98882C.1.pep
MAAAALLSPPPSPSPSPTPSSLHPRQALRFAVGTGGGGRARATSTGTRRRAALVPCSSSVSARGPASGGDGLALERRRLLLSGLVSSFVLVLPVSDSHAVAEMDEDVKMATLVDPINAYSFLYPVELPGKKFTFKWVESRKPERYSSAAPLSPDARQRIVSERVDMIHNVVISVSIGPPNSRFPPSKDKSKWDPKDVADWILAEKSSLKVTTGQRMTESSVLDAHSSDVDGEPYWYYEYLVRKSPTQSAPEPNLFRHNVACTAERDGYLYSLNASTLSKQWESMGPSLQKTKIMFLHTRIHGDFGDIAIRFLLLLFHVLGDLGTSGFRTYXFPVMDASVMSALSVLQMEA

SEQ ID NO: 203727 - protein, 253 aa, Oryza sativa
  Clone ID: PAT_MRT4530_98883C.1.pep
MIYTPESPLYQVDDCERKQNDLQSSRSQCSANSLSNSVLNINKGAPGPPANWQRKDGMFPQCTPKHDLRCFSNFSTKFMKRSALSDIVSRGSMSRKFKAFSQSDEWSDVSSRWGKESQVDFALGCEKAVSNLPLSDGLFSPRPTRPETRRHRSSPHHRSPPSPPRLAAASTAMAETVVLRVGMSCEGCVGAVKRVLGKMQGVESFDVDIKEQKVTVKGNVTPDAVLQTVSKTGKKTSFWDAEPAPVEATAASS

SEQ ID NO: 203728 - protein, 52 aa, Oryza sativa
  unsure (1)..(52): unsure at all Xaa locations
  Clone ID: PAT_MRT4530_98884C.1.pep
RSPXSRHSPNVXERGESAYVHSAEPLATPAASDSLECGPSLKTFRKAARQER

SEQ ID NO: 203729 - protein, 541 aa, Oryza sativa
  Clone ID: PAT_MRT4530_98885C.1.pep
MAAGLLLKLVGFCFWAVFWLGGAATVSTNAGGEAAAAAVVVDARSAIAVTDEDFVCATLDWWPPDKCDYGTCSWGLATLLNMDLSNKILLNAVKAFSPLKLRLGGSLQDVLIYDTGDPRQPCTPFTKNSSAMFGFTQGCLPLHRWDELNAFFQKSGAKIIFGLNALNGRVPMSDDSLGGPWNYTNAASFIRYTVSKGYDIHGWELGNELSGSGVGARVDADQYAQDVLALKQIIDNSYQGHASKPLVIAPGGFFDAAWFTELISRTKPNQMDVMTHHIYNLGPGVDTHLIDKILDPSYLDGEAGTFSSLQGILKSAGTSTVAWVGEAGGAYNSGHHLVTDAFVFSFWYLDQLGMSSKYDTKTYCRQTLIGGNYGLLNTTTFEPNPDYYSALLWNRLMGTKVLSATFNGTNKIRAYAHCARDSRGITLLLINLSGNNTNHIYVTSEGVQPYSTKKEGRRRFGRIPGLGEEAQLIREEYHLTPKDGSLQSQHVLLNGNVLAPDANGEIPKLEPVQVEGTQPITVAPYSIVFAHIPRFYAPACR

SEQ ID NO: 203730 - protein, 44 aa, Oryza sativa
  Clone ID: PAT_MRT4530_98886C.1.pep
TPTQKWVMASVPEDNILQIWEMAESIYCDDNYLHDNDDDSCPAT

SEQ ID NO: 203731 - protein, 94 aa, Oryza sativa
  Clone ID: PAT_MRT4530_98887C.1.pep
FVFRESKAKGKGADEYWLIWRYEGEDTLFDLMQSKEFPYNVETKILGDVQDLPKGIARENKIIQTGMRQLLFALDGPQSTGIVHRDLKPQNVNF

SEQ ID NO: 203732 - protein, 121 aa, Oryza sativa
  unsure (1)..(121): unsure at all Xaa locations
  Clone ID: PAT_MRT4530_98888C.1.pep
CMSEGGWWACSSWCAEVVAFIVGSALSFFQGLDELPGDALCVEPSFLMRFASIFYGRVATKVCGRSIEWYLVGAVLGVDGVPGWLGFAGGGKGWXPPPPPSSLLTKRERGCSSLLTKRERE

SEQ ID NO: 203733 - protein, 188 aa, Oryza sativa
  unsure (1)..(188): unsure at all Xaa locations
  Clone ID: PAT_MRT4530_98889C.1.pep
REKSKKTGPKAPAKKRAHRGGTPPPPPVKGPDKGGAPFPPKGAKVLERGTGGAFFPNPPPGKRGIAPKRLKWGTPRVFPPPRFKNRAPEVKLGGPKKKNKPPHPRDEKLGPLKRPPLFFFFGFFFFFFFFFXFFFFFXFFFFFFFFFFFFFFFFXXWEALILLLFHFIFLHRIEEWNDKLSTNDFTTQ

SEQ ID NO: 203734 - protein, 449 aa, Oryza sativa
  Clone ID: PAT_MRT4530_9888C.1.pep
MRRMLRCFFGGGGDETGGDEEKKASAAAVVKNKKAVRRMRSATGRLRSLSLEDLSRTLAQSGLQAFTLAELKAATRSFSGSNFIGEGGFGPVYKGFIDAKLRPGLLQPQHVAVKYLDGEGDQGHREWLAEVVYLGMLSHPHLVKLIGYCCQDDHRMLVYEYMARGSLEHHLFKNLLSSLPWATRLKIAVGAAKGLAFLHDADTPVIYRDFKASNILLDSDYTAKLSDFGLAKEGPQGDATHVTTRVMGTHGYAAPEYILTGHLTAKSDVYSFGVVLLELLTGRRSVDKRRRGREQNLVDWARPYLRRPERLHRVMDPSLEGGYSDKAAGKAAMVAYHCLHSVPKSRPHMRDVVAALEPLLQTSCGDVLAGPFVYTVPSAAAVVVAAKDDGKKAAAAAGEDGEEEVAAAAKAKRRYVASAVHAEGAMRKGEHRYASSVSGSPRQSRDRGG

SEQ ID NO: 203735 - protein, 40 aa, Oryza sativa
  Clone ID: PAT_MRT4530_98890C.1.pep
MEYICRQEVSIDIPASSFALMGKASKSSLSQSRAKWELMM

SEQ ID NO: 203736 - protein, 242 aa, Oryza sativa
  Clone ID: PAT_MRT4530_98891C.1.pep
MGNAVGAAANGVAAFFGNTLFAPFRSLLDVSCDGVCAGTWDAFCFIDHLCALSLGKLILFLVLSYLMLLVMWKLGGKCVLKSACKTAMAACSCCCHAMAAAPCYLWRALRSTRRVRRGRRRRRDDDVEEGRGGGGGWGGSSSGFGWSSNEEEEEEEEEEGGSSSTGGGEYGGGRRRHGRSGGGGARKQERMRRSLRLRPASFKEKAVATAARRSRSSHGHGESGGGGGGRRLRRVGSSSRRM

SEQ ID NO: 203737 - protein, 67 aa, Oryza sativa
  unsure (1)..(67): unsure at all Xaa locations
  Clone ID: PAT_MRT4530_98892C.1.pep
VCHGESDVVRPHEASREIELIADRSYERVDAVATGCPHLRSLWLYYXQNITDXSMYSLTANSRWTTS

SEQ ID NO: 203738 - protein, 71 aa, Oryza sativa
  Clone ID: PAT_MRT4530_98893C.1.pep
TAKNKCRMVQTCMNHRIHTKQFSKPWTTYIRVGQNAVVWLLLNFFQNTHHIKYTFLSILAKNELTCIKKEA

SEQ ID NO: 203739 - protein, 101 aa, Oryza sativa
  unsure (1)..(101): unsure at all Xaa locations
  Clone ID: PAT_MRT4530_98894C.1.pep
EGPQIRCNHPGNRINCHNHQXDPPVTHPAEAGDLLGXPRFSQTLATSAQVSPPRGRSKLIPNDGXRGKMDNSHSYNHHNCPITGGVHSLSQHTQASSRFLF

SEQ ID NO: 203740 - protein, 320 aa, Oryza sativa
  Clone ID: PAT_MRT4530_98895C.1.pep
MHCYDVCMDGWAIRFSGSTRRNYSLFVNVYFVFTNMSNTGDNGNTRDKEKEASVNTNGDNTISNSSGEPFLGSKLHPRFNNLAEIIIFRLIFEKGDKKQVKLKVRGASETEVKNVLRQEFKESIEYRNYSKNPESSSLKVEVRGTVDVGKLYERLKKMASSVKIESVIPDDVKEEIERYKKDLERMKRQKEDLDIKLREKREEKKVLQADKTAAEEEQKRLKRDKENLNLKVDTKRKENRRLEEENKKLQRKIKDLEQKHKGGTSIEYHGVEVHQKMNHMHQEVHMHEVVRKLKISDNDHGNANGRGHGQLLQQLGHGRN

SEQ ID NO: 203741 - protein, 250 aa, Oryza sativa
  Clone ID: PAT_MRT4530_98896C.1.pep
SMERTVRTLDRQISQFVAMDRLIWADSADADAFLEAVDDLIGTVQELEAAGTNRGLFDRAEELLSRCMARLEEEFRALIERPDDAVPAAPGGFRSDGSDDEEDFGGGDGYGDEPIPIAKPVTDYDVVIDALSPGSVANVHQIARRMVDAGFGRECAEVYAAARRGFVDESVARLGVRPRTAEEVHASSWEELEFDIARWIPAFNMVFRILIPSERRLCDRVFDGLAPFGDLAFVAGVRTQALQLISFGRC

SEQ ID NO: 203742 - protein, 76 aa, Oryza sativa
  Clone ID: PAT_MRT4530_98897C.1.pep
YTAIALDVDNCSSMTFIRGSADLNIYLIRSEWGAPFSNACTHGPLPFPFFFPNLKSTVPLLGLIPYIHSLLGHSLP

SEQ ID NO: 203743 - protein, 140 aa, Oryza sativa
  Clone ID: PAT_MRT4530_98898C.1.pep
MQPRIGCQVPPERKNKSRKGREQERRAATTAQEEVEWSLIGEGGVEENTERVVTSQDPLVHKASSTPPRRSSSHGEPAWRVGGRGLSRRGWVLSTTTQGEPIGAKLDPKQPQRGSRTQLSRWQVEASLYARPSTSSADNH

SEQ ID NO: 203744 - protein, 97 aa, Oryza sativa
  unsure (1)..(97): unsure at all Xaa locations
  Clone ID: PAT_MRT4530_98899C.1.pep
PRLYANSQNRGPPRGIRGGPACQRLGSPMAGCMRAGRXVRGRGAVRGGRGCGGPTRSLSARGGPRAREREWREAADRGQPDPIHAEVAPTWRLRGCH

SEQ ID NO: 203745 - protein, 96 aa, Oryza sativa
  Clone ID: PAT_MRT4530_9889C.1.pep
MKARPSVDNIKLEGSTSEQTLNIPNPQHIIILPFKPYYRHLSLGSKKEQKGSSICCNSYRTNEDWKEKMLESRDEVLRLLNKDYHANPHRRPPVHN

SEQ ID NO: 203746 - protein, 94 aa, Oryza sativa
  Clone ID: PAT_MRT4530_988C.1.pep
MRDTKARVDARDPDSEKGTRPMRYCRRRQPPRRAPAGSPLTATMIKRRHTRMLSRMGREEGEAAQSTGAATSALQLLCVSEIVERVLVILQSSG

SEQ ID NO: 203747 - protein, 59 aa, Oryza sativa
  Clone ID: PAT_MRT4530_98900C.1.pep
ATVQLTHLLLESNHIHTPHLCLLKGIRTNQPVQSSYTGNCILILGGSCEAYYILQKLVL

SEQ ID NO: 203748 - protein, 80 aa, Oryza sativa
  unsure (1)..(80): unsure at all Xaa locations
  Clone ID: PAT_MRT4530_98901C.1.pep
VPPRRCLRAAGPXRCRRTTPCAASEPEGVADPSEGRDPQDFEQGKSLLFFEHVDPNCEIILFTNKIACNDEHPTCDYAMP

SEQ ID NO: 203749 - protein, 101 aa, Oryza sativa
  unsure (1)..(101): unsure at all Xaa locations
  Clone ID: PAT_MRT4530_98902C.1.pep
MEHNETGCQQPLCPILCINIWGFFDXSGTINMCSRCLKEMIVKQEQAKLCSCSIRQHWQWGRSLEGTSVLLVTLKYLLLMSRRRLLLHSLLILLDLVRWSP

SEQ ID NO: 203750 - protein, 128 aa, Oryza sativa
  unsure (1)..(128): unsure at all Xaa locations
  Clone ID: PAT_MRT4530_98903C.1.pep
NNLLGQYELTGIPAVPYGLAXIIATTLIDTTGILDHLADDKTTGKKNKITITNDKGQLIKEEIERMVQEAQKYKADYEHVQSQANAGKLLKADRHGIRQLMHVLGAQPHGWRHIQGARRHRCWPPYGR

SEQ ID NO: 203751 - protein, 35 aa, Oryza sativa
  Clone ID: PAT_MRT4530_98904C.1.pep
DVYAHMGLGGSKFVPMSTFEHIIPLITIGALSNKF

SEQ ID NO: 203752 - protein, 122 aa, Oryza sativa
  unsure (1)..(122): unsure at all Xaa locations
  Clone ID: PAT_MRT4530_98905C.1.pep
QSGPDLSLPDHVLLXHFRYGLDKESAANLCISAAGSFAHKRTAEGRELLDLILESDSFCRSEVVLEVEITHEERLHVESEPDSTVESSFQLLRSSLTLSLWPSERCSCLSSRHNPVLARCIS

SEQ ID NO: 203753 - protein, 238 aa, Oryza sativa
  Clone ID: PAT_MRT4530_98906C.1.pep
MRVPAPVRDEFVVDEEPEDVALCLVMLSRDTGRPWNSRPSDEYSSLMYNSSYHHHHDAVSDDDLELSLSSPYADTEIRTKKRRKTTGAASTAGGEKRGRYECHGCGRAFLSYQALGGHRASHKRINSNCSLVKPPADQPEPSIETSFSSASTSVSPADTMISAATISKTVKKATKFVCPICSKEFGSGQALGGHKRSHSIAGELYERGHADGIVKLEQPLLADRFLDLNLPAPGGDDG

SEQ ID NO: 203754 - protein, 113 aa, Oryza sativa
  Clone ID: PAT_MRT4530_98907C.1.pep
MAAIGSSNVGFQLLKKSGWKEGTGLGAQEKGRLEPVESRVKNNKRGLGSKEPKLKPKVDEDGEKDPKKPKLEAPKKKAKLAAKRIRKMQEEEKRLQEREFEMAFFREFWPDNV

SEQ ID NO: 203755 - protein, 499 aa, Oryza sativa
  unsure (1)..(499): unsure at all Xaa locations
  Clone ID: PAT_MRT4530_98908C.1.pep
MEQPTIQTLSAPWADLCEPSCSSKPILSDGYEIGPGFIAMIXEQTFSGSIGENPYFHLRDFELVCSCLSIIGMTHGTLKWKLFPFSHRDKAKQWYIISVNNVNGTXKFHGEWEELKCKFCLAFFPLTRVINLRLDILSFRQNEKESLGLAWARFSLLTQSGPDLSLPDHVLLXHFRYGLDKESAANLCISAAGSFAHKRTAEGRELLDLILESDSFCRSEVVLEVEITHEERLHVESEPDSTVESSFQLLEPEEEEIHPPKIPFXFRDNLYEDHGNTLNYSSNTKAHPKHEPFEGVMFVSSFVSSEPIVRLHETERPLSPSIKPXPCPSGPQNVVLVYHQDITQFLHDASLEKENLQAADKLETSTLEDERKHSTYEHESFSFKIPQDSCSHKESPESCLVSTTSLCEDHSTFRSSFLTCLEGWLWMLIFIINTTNIVFVALILQHNVPMVKLVTINKALWGGNPDCYVDTCTFARKEMHPTHCANGSCLQETRFLHTS

SEQ ID NO: 203756 - protein, 737 aa, Oryza sativa
  Clone ID: PAT_MRT4530_98909C.1.pep
MEIEHLGARAAAAAGEDDQSPVEQVRLTVPTTDDPSLPVWTFRMWTIGLLSCAMLSYINQFFSYRSEPIVITQITVQVAALPIGHFLARVLPKRKFTVFGRECSLNPGPFNVKEHVLISIFANAGAAFGNGGAYAIDIINIIKAFYHRSISFPTSLLLVITTQVLGYGWAGLMRKYVVEPAHMWWPQSLVQVSLLRALHEKENLRMTRAKFFLIALICSAAWYVVPGYLFPTVGAVSWLCWAFPRSVTMQQIGSGMSGLGVGAFTLDWATVVSFLGSPLVYPFFAIVNVWVGFVLLVYVMLPIAYWVLNLYQASTFPFFSASLFDHTGEEYRISEIVNDRFELDTDAYARQGKIHLSLFFATSYGLGFATIAATLSHVTLFYGTEMYRRFRQAARENPDVHTRLMRRYDDIPNWWFYGMLALAMVAALLLCTVFKDEVQLPWWALLCAVAVAAFFTLPISVITATTNTTPGLNIITEYVMGLIMPGKPIANVCFKVYGYISMNQAVSFLTDFKLGHYMKIPPRSMFLVQFIGTIVAGTVNMSVAWWLLSTVPHICDKKHLPEGSPWTCPGSRVFFDASVIWGLVGPRRIFGPLGYYGALNWFFLGGLAGPAVVWLLARALPRHAGWIRLIHLPVLLGATANMPPASTLNYTAWCSVGAVFNYLVFRRRKAWWQRYNYVLSAAMDAGVAIMGVLIYFCLSSRGITPDWWGNSDINIDHCDLSTCPTAKGVIVEGCPVF

SEQ ID NO: 203757 - protein, 221 aa, Oryza sativa
  unsure (1)..(221): unsure at all Xaa locations
  Clone ID: PAT_MRT4530_9890C.1.pep
CLAPPAPSDRPPGQSGPSVPWTGGGPPAWSRSTVNRPPPXVADRWPLAGAAPRLDDVSPGIYCAINDLSSLIACLQCLPCMSLDSGSPDASVYFEIVAEVPPAAEQGKSCLSLEHVDPILQMLYCKGGRDGXGWALRRPMRLPDSPRHERGLPAALRGVGVKPEVWCAWLEGIMRRVLSRPLSDVWNCILLVVLCTLAGPGQGFNTQNSLEIWVKFLGVAK

SEQ ID NO: 203758 - protein, 281 aa, Oryza sativa
  Clone ID: PAT_MRT4530_98910C.1.pep
MEQVVGGKYKLGRKIGSGSFGELYLGVNIHNGEEVGIKLESVRSKHPQLHYESKVYMQMQGGNGIPHMKWYGVAGEHNVMVIDLLGPSLEDLFNSCNRKFSLKTVLMLADQIINRVEYMHSKGFIHRDIKPDNFLIGLGRKANQVYIIDYGLAKKYKDLQTHKHIPYRENKNLTGTARYASVNTHLGIEQSRRDDLESVGYLLLYFLRGSLPWQGLKAGTKKQKYDRISEKKMLTPAEVLCKSYPSEFTSYFHYCRSLRFEDKPDYSYLKKLFRDVFTREV

SEQ ID NO: 203759 - protein, 101 aa, Oryza sativa
  Clone ID: PAT_MRT4530_98911C.1.pep
GKDASQIWGGRLSGFHGGWHRRQGLGDLLSLCAIEAIQCGLFSLPVIRVGFWGPFPVVFDPVLLEGAASKIGGFGVYPVSCLFKLPLSLDIIKSLVACSVF

SEQ ID NO: 203760 - protein, 173 aa, Oryza sativa
  Clone ID: PAT_MRT4530_98912C.1.pep
MDYIRRYTEKRNTIPHVKDSEVIAVFHQGAKNEDFIKWWARKTPTSVRDMFNRANKDANSEAAVTAHLGKHAAPNSSRRDYPKSSKNNGVKRKGEETVNIVKRGNYNNHQPRPPKADDFNRIMDDPCLYHLRSNHLAKDDYLLDAYSGYHQIALNPNDCLRPCSSLRLTLTVT

SEQ ID NO: 203761 - protein, 175 aa, Oryza sativa
  unsure (1)..(175): unsure at all Xaa locations
  Clone ID: PAT_MRT4530_98913C.1.pep
ACIAXKPHGKKLKEEMERSLXVLDXCSAMQEMFADLKMTIQELQMVLNRGDHAVVQVKAQSYIRLVKKAKHHLKKASNKSTSDEDGRLVSLLTTARGITASVLKSALELLSKQISTCNPSKWSLISKSFQKAKVSCEEVQLQALELGIVGLESGAENLFRRLIQTRASLLNTLSS

SEQ ID NO: 203762 - protein, 34 aa, Oryza sativa
  Clone ID: PAT_MRT4530_98914C.1.pep
KEGHFLLTWSKKYRGVAVQWSGLAPRWIIDVLPF

SEQ ID NO: 203763 - protein, 67 aa, Oryza sativa
  Clone ID: PAT_MRT4530_98915C.1.pep
KKLSIPCFWKKNGVFPDHIIVRLACFFLIYNPHGNFKVQVVLAPQNSVQTPCKYLISSVIPLASDIL

SEQ ID NO: 203764 - protein, 60 aa, Oryza sativa
  Clone ID: PAT_MRT4530_98916C.1.pep
QPTGNSLFNAADFFLWVFASTFYLKPDNNSFWYPFVSTPYFLGREKSILSALLKPSPMFL

SEQ ID NO: 203765 - protein, 76 aa, Oryza sativa
  unsure (1)..(76): unsure at all Xaa locations
  Clone ID: PAT_MRT4530_98917C.1.pep
LALPSAPPPSTSPSSTRPSHPPAGPXPPRXSGAAPPPSRTTSSSVGSTWGRPPPGRRGGPRTRPMMDGPLSLTRSG

SEQ ID NO: 203766 - protein, 185 aa, Oryza sativa
  unsure (1)..(185): unsure at all Xaa locations
  Clone ID: PAT_MRT4530_98918C.1.pep
XXFXXKRFLGGGGFSXFPKFXXXXSPXIQKFKXVFSPXEXFXKKIXIFVXXFXXPXFPEKTLVIXYSNXNKXFGSIGSLPPXWKKLXGPLAPXPFFCLGGPFPWXTXXXFFKTKKILNSFPXKXALLFXIXISXPVXFGXFXXGXSLPLGGFLKKKKKKKKKKKKNFPKXGGGAXGVXPXFSPPP

SEQ ID NO: 203767 - protein, 204 aa, Oryza sativa
  Clone ID: PAT_MRT4530_98919C.1.pep
MLLAVEGGGFFSSSASGYSHGLALLLLGRKDEEKPVKVSPWNQYRLVDREAEQVYHLASRKDQAPGKCAPFICFGRAAAGLEGASPPKLSSGNTSGSSSEESSASANEGTNGSLTGNEKKGCLKSNSRRDSLEHCIVVSEGEEPRESLEEVQTLKSGMERRKVQWTDTCGKELFEIREFEASDEGLSDDDTENEGFRKCECVIQ

SEQ ID NO: 203768 - protein, 462 aa, Oryza sativa
  unsure (1)..(462): unsure at all Xaa locations
  Clone ID: PAT_MRT4530_9891C.1.pep
RCPSTPDFVHLHPCTFVYNQTKPQTKPYPLDMWKYGSALQQRPELNPYSTRGTTNKTXHAPRAQPKTILGVLNRGGERERPSEPSATTANHASRTSGTTKTTRSTQAKLQAYKEAITIHKKKTEYTETVHGSTEADPVCQPRLVADKRTPLDTTRAAHVETTWLTSGHTNTVTTHTSERLPTPVHGRDAAGTRLDDAEPRTKTTTGAAATLTKHXGWTRTARRRDERHNDPEQREDDDDDDRGRRGGDEGSRQQLHGGEDGVGHAAAMPTTVAAQPDDEPGERWDVDDENERRRRRWTAEGEPTSRGGGRGGRRDAGDEENGEAGAGDGGLRTNQRAGRGRGRRGDAEGGDGATGPHLSSAAGAAGGGTVDDGGNAPPAVTARNGGQAGGEEAAATLEEATARPAGVLMRWQGRLKTAGGTGERGRRRGVLGNDFYFGMNLSGRDTNRHQIRSKHLINYKGG

SEQ ID NO: 203769 - protein, 162 aa, Oryza sativa
  Clone ID: PAT_MRT4530_98920C.1.pep
SLPLMEAVVDFGESSPYDPRRKECKHELGKPKSLVPGISLGEPQRGEPSLDEALVGHGAGPVGFDVPDKNGVHGILNLVETAGEPPPLLTPRELDAVLAARRPGLRREDPAAKWRGGEEAAQAAAGLGRGRRRRQGAAEGTHRRRHPDPRARSVEPAARGST

SEQ ID NO: 203770 - protein, 95 aa, Oryza sativa
  Clone ID: PAT_MRT4530_98921C.1.pep
GGGKPLKTLGAFGGGNRCSQGETGLPKREKQKPGGRAPGNKTGGQRGHIIMRGPSLEQGLKGFTGDLGAWSWEKKPLNPIPGGFWGGRPWAGTPK

SEQ ID NO: 203771 - protein, 88 aa, Oryza sativa
  Clone ID: PAT_MRT4530_98922C.1.pep
MASAFSHLPPKATIATMQDPSEVPRRIVMENPVNMGGEQHAEKNNMQHENNVLLQNLGEQHAEKNAPGQVQEEHAEKNAPGQVQEEMQ

SEQ ID NO: 203772 - protein, 173 aa, Oryza sativa
  Clone ID: PAT_MRT4530_98923C.1.pep
MSSSRLGGGDRAGMYEEGEDDELFGESSSVSGGESDDDGEGEDQFSEGGAAAAAALDQMEHRRFAPQPLRRLNSDSIYDMSSMTEQLPAKKGLSRYYEGKSQSFACMSEVRCLEDLRKKEKPYKSKIKSCNSYAALGGIAKTQSSSSCANLSMMGAGGFRAPPIPVNKNGYHQ

SEQ ID NO: 203773 - protein, 96 aa, Oryza sativa
  Clone ID: PAT_MRT4530_98924C.1.pep
LPLLRLRVRLAESWRAAACFHHWPHRAPAEQHSLVQGTFHLGASLLCERDHLLSTTDASMVMICVQIICVFPLSFLVIDLFRNFCRIEEGVGNRQG

SEQ ID NO: 203774 - protein, 101 aa, Oryza sativa
  Clone ID: PAT_MRT4530_98925C.1.pep
QDIFVCILAFMPTGWGLLLVAQAIKPVIVRIGLWGSIKALARGYEIIMGLLLFTPIAFLAWFPFVSEFQTRMLFNQAFSRGLQISRILGGHKKDRATRNKE

SEQ ID NO: 203775 - protein, 84 aa, Oryza sativa
  Clone ID: PAT_MRT4530_98927C.1.pep
MDLTAAFHQPSPDKIKSQESGFDADAALPPGRRPHRAAAGRAEAGRGGPAQAQRPRPLRVLRDSVQPPQQALKHGAKAYYDGPA

SEQ ID NO: 203776 - protein, 72 aa, Oryza sativa
  Clone ID: PAT_MRT4530_98928C.1.pep
STLRNYHSSSINLDTQHTVGWNRTEKSTPETDTPHSTHSLVTPRGSLIPPLLQRITHLFFPTKPYDTGEAAS

SEQ ID NO: 203777 - protein, 44 aa, Oryza sativa
  Clone ID: PAT_MRT4530_98929C.1.pep
LLSPFWNINAHSIVYITQGRAQVQVVNNNGKTVFNGELRRGQLL

SEQ ID NO: 203778 - protein, 101 aa, Oryza sativa
  Clone ID: PAT_MRT4530_9892C.1.pep
MNTRLHPNHYRQDAICDRSDTGRVSNRQPRSHVAPVSAGSGGRCGASQRPEPVYIVRVSRFFLARDLSTYRESLRSHPKPPAELAKGGLRGLPVRSHELRH

SEQ ID NO: 203779 - protein, 55 aa, Oryza sativa
  Clone ID: PAT_MRT4530_98930C.1.pep
ASTMCRTEKRRRGPGHACLGIMPRDAKPGLGRAGNDGVLSVAFPHEGIDVMPHCL

SEQ ID NO: 203780 - protein, 577 aa, Oryza sativa
  Clone ID: PAT_MRT4530_98931C.1.pep
MEHGRRQGVVAIECVAGGSRAEEWGPGSSETVQTGDVVEEILIGVGGRGGPAAHAAPFKGGRAAVQRLLHSAYKRGDTSVEVRVRRPAHAQQLVTTSGELLPSPAAGAATTTTARMQACIVPQEAAVGGGGAMMAVVGRSRQYVLRSIRDPNYAVGFVDRMESECIAIRVWGYDQNILGLMYDRVRIARAGDNIVVGVGGWRAAGSRSSRVVCALSKAQLQDGYVAYPWEKKMREALPIPNSSSFLSMLVLPTALDRAASRYNSVEDTLARANAWILSSQSSGVPISFLNVQTEALLTKISGETASATVNSGSLADLPNLANASLYGFEDYHGVDIGVVKAVRVWYTAAAGEMPVEITLEAGDTKLGFAISRTEEGFIYISSVMEDDSGFLAPSTRSGLRDLYREAKRASKLLVISRVSGQKVLPWMVSTSGAIRCFDTVSLSQKLSLHRHALRPILLHLLMWEGKSADAPARPHEPRLPPQPAPYPEFAAGLVRQDSFGGGELPRQDSFAIGELRRQGSYGVELVRQDSFGVELVRQDSFACTEPPPVRRGDLQGRDTAGDTSFRFHNFSLPNNWV

SEQ ID NO: 203781 - protein, 162 aa, Oryza sativa
  Clone ID: PAT_MRT4530_98932C.1.pep
SPLPRSPVASPPLPAVLLSLLCRRPPPAASPTSPERHPVAPSPPAASQPPPLPRAVLRLARRAPEARSRRRSVASPPLHRLRPAPVHHRYADRRLRLLLRYRGIVSFPGHSSVSPEHRRAVPASPSTSPEFPRLALPLPVRRRPRHHHLGHRSGELVTSSSA

SEQ ID NO: 203782 - protein, 171 aa, Oryza sativa
  Clone ID: PAT_MRT4530_98933C.1.pep
SPLPHSPVASPPLPTILLFLPCHRPPPAASPSSPERRPVAPSPPAASQPPPLPRAILRLARRAPETRSRRCSVASPPLHRLRPAPVRRRYADRRRRLLLRYRGIVSFPGHSSVSPEHRRAAPASPSASPEFPRSALSPPVRRRPRHHRRRHRSGKVALGLASPPPEPRRCS

SEQ ID NO: 203783 - protein, 148 aa, Oryza sativa
  Clone ID: PAT_MRT4530_98934C.1.pep
MGILGRIVFFRLEKVCVVTDDGHEPGAFLTNFDESADDFTDKDFESDEAIGAMYERWCKAYDKKRDLAEMTHRFKIFKKNAEALHRSNEGASKYEKIYCGPYCDGFDEQEKAEALLKFRHFPRVCEYVESFKIDFPKSREIDSPNQSP

SEQ ID NO: 203784 - protein, 688 aa, Oryza sativa
  Clone ID: PAT_MRT4530_98935C.1.pep
MSAPPAPPHPQPEELEVAEEPPAAAGGVGNDKVLAAAQHIVKSLATSKNAADDMIRILSGFDHRFSSITADLFPSPLPSSGAGPTPPPPPPPRGAFEAAERLIRQWDATSELLVFEGPEGDVADYLEAVDVAVDQLLSGVGAAAADAEAEAAGVVVQLAMARMEEELRHLMVRHAVPLDASGLFCSLRRLSLESMDDLDTSSEFDPITPHSLEGGPDTARSASLVGNPFDDQVFDLVRPEAIDDLRSIAQRMDRAGYASELEQVYCGVRRDLLDECLAVLGVERLSIDEVQRMEWKLLNDKMKKWVHGVKTVVRSLLTGERRICDQVLAVSDELRDECFVESTKGCIMQILNFGDAVAVCSRSPEKLSRILDMYEALAEVIPELKELFFGNSGNDVICDLEGVLERLGDAVKGTLLEFGKVLQQESSRRPMMAGEIHPMTRYVMNYLRLLVVYSDTLDKLLGDDSAGDVDHSDTHRGGDDEEEYLESLSPLGRHLVKLISYLEANLEEKSKLYEDGALQCIFSMNNILYIVQKVKDSELGRILGDHWIRRRRGKIRQNSKNYLRISWTKVLSFLKDDAHGGRSGSGSGSGNSSRIKEKFKNFNLAFDEIYRSQTLWKVPDPQLREELKISISENVIPAYRAFLGRYGSLVDSGRNSGRYIKYTPEDLENQLSDLFEGSLGPANHSRRR

SEQ ID NO: 203785 - protein, 133 aa, Oryza sativa
  Clone ID: PAT_MRT4530_98936C.1.pep
MMRRSLVIVMVACSCATAIARGGGGGGLKLNFYSESERCPRAEEVVREEVRRLYEEHGNTAVSWLRALFHDCMVYSCDASLLLHTTTTTGVSEQSSHRCFGMRNFKYITAIKAVVVRERPASVFCAVLLALAV

SEQ ID NO: 203786 - protein, 100 aa, Oryza sativa
  unsure (1)..(100): unsure at all Xaa locations
  Clone ID: PAT_MRT4530_98937C.1.pep
SDPQNIIDDTCMRASVPTVKLVIXNGAKVILASHVGRPKGDTRKNSLKPMVPRLTELLGVDVEKANDCIAEEVDKLAAAVPDGGGLLLENVRFYKEEEND

SEQ ID NO: 203787 - protein, 94 aa, Oryza sativa
  Clone ID: PAT_MRT4530_98938C.1.pep
RADVYSFGVVLLELLTGRRPVSILSTSKELVPWVLEMRSKGNLLEVLDPTLHGTGYEEQMLKVLEVACKCVNCNPCMRPTIREVVSCLDSIGSD

SEQ ID NO: 203788 - protein, 71 aa, Oryza sativa
  Clone ID: PAT_MRT4530_98939C.1.pep
ATYLTPRLFPLPTPAFYPSGAAMRIIRPIPRLSRRSNAATSPVPMHRLISSPSFMASAAASWWSPLLARGG

SEQ ID NO: 203789 - protein, 175 aa, Oryza sativa
  Clone ID: PAT_MRT4530_9893C.1.pep
MAPTVMASSATSVAPFQGLKSTAGLPVSRRSNSAGLGSVSNGGRISCMQVWPIEGIKKFETLSYLPPLTVEDLLKQIEYLLRSKWVPCLEFSKVGFVYRENHRSPGYYDGRYWTMWKLPMFGCTDATQVLKELEEAKKAYPDAFVRIIGFDNVRQVQLISFIAYKPPGCEESGGN

SEQ ID NO: 203790 - protein, 94 aa, Oryza sativa
  Clone ID: PAT_MRT4530_98940C.1.pep
NRIRTLFEKALDNPESRTCIALWRYYMDYETSKGNADLAKGIFYRSIRNVPWAKNLWLDAYRHLRPLMTVSELHDIMKLMMEKEIHLRKLPQGE

SEQ ID NO: 203791 - protein, 395 aa, Oryza sativa
  Clone ID: PAT_MRT4530_98941C.1.pep
MAGARDRGDGRAPRGHVVLFPLPFQGHLSPMLQLAGALHARGLAATVLHTAYNAPDEAAHPELAFVAVPSADAIARALAAAPRDGIAKIMALNAAIEASGSYAMLREKGYLPAKESELNRPVEEMPPLRVSDLFDPSKYFNEEMANKILALSTETTTNSSGTVFVTSSAPHPVFAIGPLHKLTSNGDRSSLLDQDRSCIEWLDTKEPGSVLYVSFGSVVMVSQDEFNEVAWGLANSGRPFLWVVRPGLVIGVSGKPELPEGFVEAVEGRCKVVDWAPQTEVLAHHAVGGFWTHNGWNSTLESIYEGVPMLSRPIFGDQLVTARYVQETWQIGFRVEGKLERWKIEEAIRRLMEGEEGAEVKQRADELKKKILICLKNGGSTQQAIDKLVDHMLSL

SEQ ID NO: 203792 - protein, 161 aa, Oryza sativa
  Clone ID: PAT_MRT4530_98942C.1.pep
MVKGAKGADNPVLTSSIATPSTHLLPRHWITHPLAGFVAKNCKRMGEGVSQLSSCSSSTNACSRRRKGVNGTSSFVRWPHHVSHQLIGLSAISILSRAHCLLCCHRRCRRLAKKLAPKPILCSRLLVIDAAQGTMPTGFVRDEAKGGKSGGVAPLRRPAAH

SEQ ID NO: 203793 - protein, 464 aa, Oryza sativa
  Clone ID: PAT_MRT4530_98943C.1.pep
MAGARDRGDGRAPRGHVVLFPLPFQGHLSPMLQLAGALHARGLAATVLHTAYNAPDEAAHPELAFVAVPSADAIARALAAAPRDGIAKIMALNAAIEASGCARDALASLMSGPERPACLVIDAALPGAQKAAAELGLPTIVLHTGSAAAFRLFRSYAMLREKGYLPAKESELNRPVEEMPPLRVSDLFDPSKYFNEEMANKILALSTETTTNSSGTVVNTFEALETPELRSVRDELGATIPVFAIGPLHKLTSNGDRSSLLDQDRSCIEWLDTKEPGSVLYVSFGSVVMVSQDEFNEVAWGLANSGRPFLWVVRPGLVIGVSGKPELPEGFVEAVEGRCKVVDWAPQTEVLAHHAVGGFWTHNGWNSTLESIYEGVPMLSRPIFGDQLVTARYVQETWQIGFRVEGKLERWKIEEAIRRLMEGEEGAEVKQRADELKKKILICLKNGGSTQQAIDKLVDHMLSL

SEQ ID NO: 203794 - protein, 128 aa, Oryza sativa
  Clone ID: PAT_MRT4530_98944C.1.pep
MKEARLRVLPSCQETLEGPISQDQSGPSDLLRLSFLLRSGHRRDTAHVLPAGAPLLHLLPTRGRGIPVPSTPASPLHLRACTSSSSEVGSPFHVFLRRPPPNHRQVEHHGSSGGPRLTRFFISMQTHD

SEQ ID NO: 203795 - protein, 928 aa, Oryza sativa
  Clone ID: PAT_MRT4530_98945C.1.pep
MAVKDRFTGNPGRLTVLTTSGSGDLMHIQLRNSGSRISGRDKDEVAFPHPCTIGEKYQLYFYSHPETSRDTNRSSFLNAHALEPRNRSTTSPLVITRAEARMTSPRRLIPVCESKHTNKNKKEFGCETKTIRKFIFLDFHPYKECPNPSMYATWAPSLVQTGSGLRIALEVDLVWASTLTWTPWMILHDSKSFSKCLLVPSIVHNHNIIIRSNVRIIPRPGAPPPLLATPRRAVLASATASRTSFHRAGLCHRRPHLLLRSGQIQSGATRGGQIRCLLARRARRRYSTHQAFTASPMPEMERRCKIGPAAAILACQPAFQRFEQDLQLFDYGSSSASAISAVAAEHLDSYTSVPLFIEHGSIPEQPPIRLIDWDNLDIEGKKDDEGRTEVMTDDQLFELLGLSDENERAKKSAQVDESNNVLELNGHAVIEGTDGAAIPVDDAIPGEVVILYDKNNPCMDKGTMYPSLKEFRLVVRQFVIKKEFELAIEKSDPERYRVTVHNEDHGCTSTMRIKTTTPSQAWVADKAIDILNTNPNMGPKALWKEEVLKRSPGSIVEIDIKEVDGRPYFHRFFCALSPCIEGFVDGCRPYLSIDSTALNGKWNGHLASATSINGHNWMYPVAFGFIDSESEDNWVWFMTQLHKAIGDLEPLAICSDECKGLENVVQKVFHKAEQRECFFHLMKNFAKRFHGDTFGNMYPAARAYRSVVFQKHMTPIINGSPEVWKWLTTYHKLKWMRCGFNPEIKCDYFTNNIAEVFNNWIRDYKDLHVVDLADKIRETILILWDKRRRIGERLHEEYVDVYYLVEKFKAAYKREIPALPDKSHWPQVDMPFNLGAPLGKRGVGRHRKLRIKGCLETGGKSSAKSADKKKKMGYTNARKPRNGDKKEIAQAPQEKQEAIWEQAFLQEQISRELAHLEEIVLLSLRRKN

SEQ ID NO: 203796 - protein, 133 aa, Oryza sativa
  Clone ID: PAT_MRT4530_98946C.1.pep
LREPQKVPTSASAGATAWRGHPGREGLSAAGPHHRRRPSSPSSRLWPSLPRRAAAGRPPRRAALTPRPSLRLAEPPPLDPSLPSPPPDHLSSPRRCWPSPPNRRHLIAIFVGSHLAPRDLPASGDPTAGSFYQ

SEQ ID NO: 203797 - protein, 55 aa, Oryza sativa
  Clone ID: PAT_MRT4530_98947C.1.pep
FFFFFFFFFFFFFFFFFFFFFFFPRESLAGDCNRQIKYIAPKKEPINRPSSGGNS

SEQ ID NO: 203798 - protein, 72 aa, Oryza sativa
  Clone ID: PAT_MRT4530_98948C.1.pep
KIVKYKEEFDLLLLSSTITGRVRERSLHGNAKNERRRTVKKMAGSALGSKPASAAAPSKLLVPGGLRALPIP

SEQ ID NO: 203799 - protein, 131 aa, Oryza sativa
  Clone ID: PAT_MRT4530_98949C.1.pep
TRANPNSSRRHRGRDRGIYGVPLREKLTRSARHGSQMAGGYGVEWFQVVYGKAEQASAVLSQHDLVRESGESLILERRKKIGTHNIRHLWMVAAFAMSGYLFGAGVATLIKGNNRRTPEAAGTKEDTTDEH

SEQ ID NO: 203800 - protein, 179 aa, Oryza sativa
  Clone ID: PAT_MRT4530_9894C.1.pep
MTTGAGEEATRAAGNGCTETRTAWNTPLRCRRRRRRRETTSRRGGTMTTTTNTGGVRSKGRRGRGQPCRCEAGGGDGDVGRRTGTAEGAAGVGADEAEGETARATAFRRNTGDAVAWPGKRMARGKQAGHGRGRNDDGKHSRRPWKAAGKDASVPDDWGRHSRGKLGGIEEESMGIKTP

SEQ ID NO: 203801 - protein, 132 aa, Oryza sativa
  Clone ID: PAT_MRT4530_98950C.1.pep
MWWWRLPSQPWQQGGGVGLGVAQERPETGQLTSETAVRSHKTAQLGNGGEERDGGEVTPFPLPPDPRIIPPLPTVSTSMMMWSIKRHSDELIADIHVIEWVQLSDPSSVAHRIDHHHQHPSFLCNHCGARGT

SEQ ID NO: 203802 - protein, 795 aa, Oryza sativa
  Clone ID: PAT_MRT4530_98951C.1.pep
MGVSLAVMDPMDDHDSDELPSGVASDEAHVAFRARTKKRSKVWDEYKPIYVNGVVQSAECRYCHILMSCKGSDGHSNGTSHLWRHQKICRAKEDLDLAQLHDTGFPYDSLDDIKLASHSDNSRFRSKVWEEFTPVYVEGRIQGAECLHCHKRLSADKGRSHLNRHTQTCPARGETGINHKSPFSPSSAPSFKSGVQDELSPALTNGKVQIAEYASKLLKVNSSVDKTPQSQHILALPARDNMTKEQNTSSTHAAPDVSTSKFDQETSYQELIRMIVLHGYPLSIVEHEEMKRFAKSLNPLFNMASSIDVEEYSTLLYQKEKADLKEKIAALSSRRISLSASIWAPHGAEPTVKYICLTAHFIDAEWRLQRKIIKFGVFWSLPTDLERMILYKEACVLDSESGPYNVIAEAISDWNLDNKLFSLISVSEIRNHEGTTKLKDMLIQKNSLPIRGELYNIACVDDVLNNIVSKGQSMLHLVDNILERFMLAHAYSSLTQQQLFEAVTNMGLKCPQEDAKWWHKIYFRLEVVLHCKKAFPSEELLPAEDYKVVESICKILRAFYRAIEVISGPVCPTANVYFNELWKVRTTLQEEASTDHTEVASMVREMQEAFHEYWENSYLWLSIPIVLDPRFKITFIEFRLKRAFGAEAAKYVAAVREIIRELFHEYCGPVDKGVHTSNNEARDVEMDGFDSDSLEDWDQHLSAQSRSQRLSELDNYLEDGLVPRKDDFDILNWWMIHSTKYPTLSVMAQDVLAMPSSALHCKAAFSSEGPVIHKQWSTLNIKTIEALVCTQDWIR

SEQ ID NO: 203803 - protein, 207 aa, Oryza sativa
  unsure (1)..(207): unsure at all Xaa locations
  Clone ID: PAT_MRT4530_98952C.1.pep
MEEEVELPLPTEKLAVDPGREGGEQELAKDELQQRGYCVLGGYMSPVNDAYKKEGLLSAAHRIRLCELACESSSFVMGDRWEAMQKGYQRTLTVLSRIRNALCKDGLADGGSLKVMLLCGSDLLESFSIPGVWIPDQIRTICKDFGVICIRREGKDVEKIYNXSSSETLSECRDNIISVEYLVCDEVIQYIGEHKLYKEADGSDTRK

SEQ ID NO: 203804 - protein, 252 aa, Oryza sativa
  Clone ID: PAT_MRT4530_98953C.1.pep
NSRLVRRSSSSLASLLLGMEDFSSYVSQKDLSQLFVLPLSEQAFQEYLLMSSSDHLSQLNDDRDLWTDVWGNGIFSSQKIYAMNFMHIQVPNSINWIWKSKCAMKIKVFGWLLLIDRLNTYDMLDRRHCAPHNAALTCVLCSANARETTLHLFFQCPFSSQCWAQFGLVWDLSLNFEEMLYTAKSSYRSSHFVEKVLYAAWSIWKPRNGLIFNNVAPSIASWRAFFKNELSLLVHRLNLFERDTLVNWINLV

SEQ ID NO: 203805 - protein, 78 aa, Oryza sativa
  Clone ID: PAT_MRT4530_98954C.1.pep
VEWNLGHRRQDLVKANDAFPEIRSQALDRHPSHRRPVSLGLVLASPRLIEFSLCYVSNTSPGHARPKVTQHPHGEERK

SEQ ID NO: 203806 - protein, 238 aa, Oryza sativa
  Clone ID: PAT_MRT4530_98955C.1.pep
SRSERRRDDEERDRERYRERDYRDRDVRRRKEEAGEPEADPERDQRTVFAYQLSLKADERDVGEFFSRAGKVRDVRLIMDRNSRRSKGVGYIEFYDVMSVPMAIALSGQLLLGQQVMVKPSEAEKNLVQSNASSSGAASGGARKLYVGNLHSNITEDQLRQVFEPFGQVELVQLPLDPLTGLCKGFGFVQFARLEDAKAAQSLNGQLDIAGRVIKVSAVTDQARVQVSGVTTGDLDDD

SEQ ID NO: 203807 - protein, 117 aa, Oryza sativa
  Clone ID: PAT_MRT4530_98956C.1.pep
MAAAMGAAVVRRLHAAQAQAQPPRLTKLALRAPKFVEVEFEDGSSFHLPAEFLRVYSPAADSKIRSVAGEKVIFGRRHVGIMSAESVGNYGVRILFDDLHKTGIFTWDYLHHLGSNK

SEQ ID NO: 203808 - protein, 471 aa, Oryza sativa
  Clone ID: PAT_MRT4530_98957C.1.pep
MEGIQVSLISHLHAALPTFSIGTHYPHHASFPLPTTPFALRLPPPYTLSERAPLALKAVTSSPTNFQRLSFVHTNVSLFDSASESRRCRHRCCCAANVGRVRGRPPDRLRAPPPPRFPAGGPRLVRILRRDLVTKGVTLSVCCSMLSSSNSSAQALERLPFKADGYNFWTWRGRRIHYVEQGAGQPIVLIHGFGASAFHWRYNIPELAKKYKVYAIDLLGFGWSEKALVEYEATIWMEQVRDFLRDVVKDPAVIVGNSLGGFTTLFAATEVPELVRGVVLLNSAGQFGDPNRPPEAAEAAAGEESAVTRLVVRPLKEAFQRVVLGFLFWQAKQPARVEKVLKSVYKDATNVDEYLIGSITAPTADPNAGEVYYRLMSRFMANQSRYTLDRLLGKLSCPLLLLWGDLDPWVGPAKAAQIKKFYQDTTVVNLQAGHCPHDEAPEQFNGALLEWLASLDAGKPADQPEPALQSV

SEQ ID NO: 203809 - protein, 566 aa, Oryza sativa
  Clone ID: PAT_MRT4530_98958C.1.pep
MDFDEYDYLEKTVEGSGAPSNGAAAPRSEEKERSSRRRSGGGGGGDEERDDGERRSKRSRSEENRDRDKDKDRDRHRDRDKDRDRHRSSRERRDRDRDRDRDEKDREKERDKDKERRSRDREKEKEKEKEREREREKDRERRSRSRSERRRDDEERDRERYRERDYRDRDVRRRKEEAGEPEADPERDQRTVFAYQLSLKADERDVYEFFSRAGKVRDVRLIMDRNSRRSKGVGYIEFYDVMSVPMAIALSGQLLLGQQVMVKPSEAEKNLVQSNASSSGAASGGARKLYVGNLHSNITEDQLRQFARLEDAKAAQSLNGQLDIAGRVIKASVFFRFTRIHVVFKLYISNIRVLPDTMLNCCNQVSAVTDQAGVQVSGVTTGDLDDDEGGGLALNASSRALLMQKLDRSGVTTSLTAGIAGTGLNTSVGLPPASVLGAPPVAASVLPTVPGLGSVPGVSLPITTQAIETAPPSECLLLKNMFDPSVETDPDFDLDIKDDVQEECSKFGQVKHIFVDKNTSGFVYLRFDSITAAMSAQKALHGRWFAGKMITATFMSPQQYSTKFPS

SEQ ID NO: 203810 - protein, 66 aa, Oryza sativa
  Clone ID: PAT_MRT4530_98959C.1.pep
PAGTCPNYLVLLQLFCRNTSGFVYLRFDSITAAMSAQKALHGRWFAGKMITATFMSPQQYSTKFPS

SEQ ID NO: 203811 - protein, 999 aa, Oryza sativa
  Clone ID: PAT_MRT4530_9895C.1.pep
MGNIIGVNGEMNGYNGEEDQLLAAATVDLLDASYCAVTMDLLAAFYRAAAVVLLAAPCRAAPVDRWHSAATATAGDRHRATVAEKALDRDRNQGFELGSGGIGVTGDFAGGNAAIWLQTYEELHSVESWAELCVVVHSKFGKDKYQEHLEELENMSQEGSVDEYYTKFEELMHKVLIYNRAFDDTYFVTKFMGGLKTEIKAAIKLHKPRSVDAALSLAKTQEELLGELNKKPYQKHHFKELYKPVNKLPYQGKGILGAAPEENKKVDEKPKWEEQFDSLKAARRARGECFKCGEKYGPGHKCPKSVQLHVVEEIWDIFQLHGGIETGEEMKRVVMRNWYSLRSSSNFLAEHLVDKLGLKCKEVQTTQGQTFVTDFKILALGGYDMILGMEWPEAFSPILVDWQKKTLNFTYQQQRVTLTGIKHQFSLGSALSVKQLKGLHKDGTSDEHDIPVEIEHVIAEYSDRFQEPKEFDHCIPLLPGAKPVSRKPYRYAPQQKDEIEKQVTQMLQEGLIQSSAGPFASPVLLVKQKDGYDRKFIKAYGVIAKPLTRLLKKEVMYSWGAEQQHAFDAVKKALTQAPVLALPDLTKQFVVETDTSDKRIGVVLLQQGHPIAFISKALGVKSQAMSTYEKECMAILLAINKWRSYLQHAEFVIQTDHKSLIHLTDQQLSTNMQQKAFLKLMGLQYVINLKKGSDNQVADALSRRHEEEGLAMSVSTLRWLETVVEAYQQDPFTQQLLAALSLNPEGVDGFLLINGVIKLKGKIWLGDLPEAHQVVLLAMHSSGIGGHSRITATYQRIKNMFVWPGLKKSVHYWLSQAQHWYNTSFHIVLGKSPYEVLFARKPTHFGVVDVGSSTIPDVQVYLKLQPFAQLSIAQRSCQKISFRYFGPYTVLERVGQVAYRLDLPAGSQIHPVVHVSLLKAAVKPDTIVSPELPLQITDDSVLLQPEVVLRRSLIKRGKAAVPYGLIQWTGVPAELATWENLRHLKLRFPSAPAWGQALS

SEQ ID NO: 203812 - protein, 160 aa, Oryza sativa
  Clone ID: PAT_MRT4530_98960C.1.pep
MEVVMPEVPSSLVHLGLGFHPKSHAREGEPSAGPHPFHSLGSLRRCHPHRPRADANRPSLTASCLPAATVVAPTPDIRCPQLPRCCPPSSHVGVDLTLPTPYLLRRLSHACPSQERWIRSWGGQVEVRPCQIHGLHHRHDLVMAAPDLDTGTLAPLLPRR

SEQ ID NO: 203813 - protein, 268 aa, Oryza sativa
  Clone ID: PAT_MRT4530_98961C.1.pep
MDFDEYDYLEKTVEGSGAPSNGAAAPRSEEKERSSRRRSGGGGGGDEERDDGERRSKRSRSEENRDRDKDKDRDRHRDRDKDRDRHRSSRERRDRDRDRDRDEKDREKERDKDKERRSRDREKEKEKEKEREREREKDRERRSRSRSERRRDDEERDRERYRERDYRDRDVRRRKEEAGEPEADPERDQRTVFAYQLSLKADERDVYEFFSRAGKVRDVRLIMDRNSRRSKGVGCGYRIFADRGFSRRFVKLREDLEQGKSPFDQLLL

SEQ ID NO: 203814 - protein, 124 aa, Oryza sativa
  Clone ID: PAT_MRT4530_98962C.1.pep
MQGLASPRCAPFCGRSGAGAGGAPRARRQQGGGCGRPLDRVAGWVGGGIAAAFFASLERCSCVNVRTHDELDDETRDSEALLIMFDVVDGSEDAASAAAGAGGRRGRRSEKSKRGGGGCGGQLW

SEQ ID NO: 203815 - protein, 52 aa, Oryza sativa
  Clone ID: PAT_MRT4530_98963C.1.pep
ECNLHCLNHPNSLITEKRAMISFISIRRDHGHNHHGDPLHFNLTTIRAICTN

SEQ ID NO: 203816 - protein, 181 aa, Oryza sativa
  unsure (1)..(181): unsure at all Xaa locations
  Clone ID: PAT_MRT4530_98964C.1.pep
MSIAVFLPGEDLMWXSPELHVQAHTXPRRMPTTGYVDTDDRDWRALSVQPSQDNEEKHWDDLGEAXKQRMLHAGPKHELVNRQHQFIHRXASKAHGGPTPALMTLQTLGRYKRXNLSDKDRALTTELGLLNILTTDTFDLLKGTLMESGLTTXADTLKDXTSVISEKAEPEPTLCETYAQL

SEQ ID NO: 203817 - protein, 34 aa, Oryza sativa
  Clone ID: PAT_MRT4530_98965C.1.pep
MHWKTPDLEPGRLGRIIECLPELLALWIQTAWDS

SEQ ID NO: 203818 - protein, 168 aa, Oryza sativa
  Clone ID: PAT_MRT4530_98966C.1.pep
MISLCLLLLRGGTPARAIAWLLCGAGGPLLLLLLGADGRADVMGVGGREVLAGAVGLTGAERHAGWGRRDALCRAPDRAHECGGLSEDGKVRLGLARASCITASLVESYDTIIAGGDGETIVLIDECHGHGGAGAAEYVKHHLLSNLGNHTEIITDIECGIAETDNHT

SEQ ID NO: 203819 - protein, 960 aa, Oryza sativa
  Clone ID: PAT_MRT4530_98967C.1.pep
MAPAKKSPRPCCHVSFLLLQLVLLSVIVFPATAAAASTFRCSNPSPVPNEVPEGNDARELLRSFQITTGYFSGGDRLFAPDDDSAYIPRSFALSPYKVAHTTDPAILEVAATLALYGPSSDHGSGGGARRRRHRYLVSQLVASFVLHGYYSSASGELCVVGGSGSYSVDGGSVEHLRDVNLHLRVPNAPSLADPFVTGLLDGADFETISLVAYVENDRYVYSEKRPSCPPPMPAHAARGALQALEANFSCSHLRELFVSSYRLENTSSDASSPAASTFQFPLSHGGLRMLVNQMHCTANGSVRAYVVFSNYTDSERRWRRDMVINNRFLVKEEAVVADGYWDSTTSRLCLRACRVAHSSAAETELKVGEQCGLGMSFWFPAVWTIRDRSIVAGLLWNANQEESGGNKHAGASLSGVMSVSSIDGDGYNRRRSNLTDVKYNYTMVEKAKKQYLSCKFSKRKTGRFPGNSSMYSYSDFRFDFIETLGAGGQASPVTIGSVMVDGDQLAAEYMFFRHAMGEMNKSRTTVVRMDHSQLLNVSYDISYRVRSANSKAPEGVYDPKTGILFMVGCQEINGSSTDCQILVTVHFASLDAKGNGHGRGKISSTRDKADRLHFEAMDITLYGMYREQIGESIWRMDLEIIMAVVSATLSCVFAALQIRHARANPASAPSATSVAMLAVLALGHVTHLALNVDALFVSRRTHYIPISADGWLELNEVMLRVPTLIAFALHLCLLQLVWSSRRSAPRAIAEKWSAAERRSLWICLPLYLLGGLLAGAVHVINNGRAAAENSLVVRVAGDSGTLWDDLASYAGLVLDGFLLPQVILNALSRSRARAISAWFYVGVTVLRAAPHVYDALRARGYVPSVRPSSTYVYASPRDDLFGVAWDVAVPLGAASLALLLFLQQRLGGAFFVRGRRFGEYEMVPTTDFDDMGSRDGFSNNKLLDDFDWGEIKADRSMSSD

SEQ ID NO: 203820 - protein, 100 aa, Oryza sativa
  Clone ID: PAT_MRT4530_98968C.1.pep
EESHRIDPIARSPPRRRRRPRPRVPSRAPLTPAPPSLPPSLPSPPLLRRPPWGEKSGAGRGEEVGDPRRGVLPPPLHPDQRPSSRSPQTPPGKPQSPSSP

SEQ ID NO: 203821 - protein, 129 aa, Oryza sativa
  Clone ID: PAT_MRT4530_98969C.1.pep
MKGGGSKRRLLRAFLHSWKKLGAAAAAAAPAAGEWAPLDGDGEGAIPSDVPRGHTVVYVGEELRRYVVRVSSLDHPLFRELLDRAREEYQFAAGADARLCIPCDEDIFLGVLCHVDSKQEHWRLISFCR

SEQ ID NO: 203822 - protein, 583 aa, Oryza sativa
  unsure (1)..(583): unsure at all Xaa locations
  Clone ID: PAT_MRT4530_9896C.1.pep
MSSRTNEGYTSCGPVVEMSWHRVGALLLGAQSYRPVPEVPAVGLKCLCNNVNIIDIIKMCLLYHVCVVYPGFSWDXINTLAFGKRQFSRSRQAVLDGQVSEEEDIVSCLPKLRKTAGSASEVEEAVKPAVKQDKRLRSVKVLSLVSNLSLPFVFPLSLSKPLQQMADNEKGNKVRSQDIGTSSSRVNEAPDTSCVTLVQHLINQNRLLIEILQQHQTPILNLSQIQPQVQLEAVQALTPQVSMPPASRRTQGDVPHVDSKEASIICFMCDEQGHYARECPQQKRKTSMRTEDEVRKMIITSTEWPPPGMTKRQRRNTFRGAPQLTEHLLANGGRVSDSEDSDQVSSDDEDEMDXKACSRCGEIGHVASSCATTCIHCEEDHPPDRCPTSRITCFFCEGTDHVPKDCQFSFLLTKKMANQPASSNGEKHQGNTNPRQDFSFSLTPVPGQRNQNEKRKCRVREDICCFNCQGMGHFADKCPKPRNIAASTSVHATPCNQKLAPQRIVIHASRSNPIARVATAPTPASALPQGVNAQFQPXPSVDKTEASIGIVPLDVPAQQPRNQVQDEEPERKKVIVCYNCSTC

SEQ ID NO: 203823 - protein, 705 aa, Oryza sativa
  Clone ID: PAT_MRT4530_98970C.1.pep
MSGADRLSIRAAALALDDAAAGRDKPDTKRDVFADLGSPVSPLRLRPGGAAATPSSSSSSAGSAKSPALCNAGAGVGRGGGGGRGSHSGELVAEGNPPRPPGHRRSGSGPLIFSGGSSSAGSGGGGGGCGGGSTASSPLTNALPTGNICPSARVASAAPAPPRRARPDVLGSGTGHYGHGSIMRGGGGMTPPRSSIDASPYHGSYSRSPAPQGSSGGLQEVTRAGNEWYKKGHYGEALRHYDQAVALCPDSAACRSNRAAALIGLGRLAEALRECEEAIRRDPASGRAHSRLAALCLRFGMVERAREHFMLAGQVNQSDPAEFQRLQEVERHLGRCMDARKTGDWKSALREADAAIANGADSSQLLLALRSEALLRLNKLEEADSTITSLSKLDIASLSSMSTKLSGMVADSYVHVVEAQVNMAFGSKTSTEVYSCRFDIAVTMAEKARVIDPGNTEVGRITNNIRLVAQARGQGNELFKAGKFAEASLAYGEGLKYEPSNPVLYCNRAACWSKLGRWMKAVEDCNEALKVHPGYTKALLRRAASYAKLERWADCVRDYEVLRKELPNDTEVAEALFHAQVALKTARGEEVANMKFGGEVETITSIEQLRDAIHSPGVSVVYFMATMNQQCQQITPSVDSLCSECPSVNFLKVNVDESPMVARAENVRIVPSFKIYKDGARMKEMICPSLHILRYSVKHYAVSSS

SEQ ID NO: 203824 - protein, 272 aa, Oryza sativa
  unsure (1)..(272): unsure at all Xaa locations
  Clone ID: PAT_MRT4530_98971C.1.pep
MYMTDLFLDVIPQTTESSPPHQSNSGRNTEYAPSLIPNGGLXTLLQGLIREPXSSAVDTSAPDPKKKTKLKKPKPTDDLPALDPXIEQALDEEEIGEDVDQAVDEKKRIVVKKKSAAPTLKPAPPPPPPSPVQQSSSDKTPSAAGSHHVEEEVQPATPAIPLVHEEKAKLDQLSVGPIQSNIDRLEARKIYLIAQLEECNAELDLEKQKLADLPNAVEDQKSRLRLAIKNVADMTKSLKIIPRTDAQDAQAIEEVEQIRQRAVSAIQCYLSQ

SEQ ID NO: 203825 - protein, 73 aa, Oryza sativa
  Clone ID: PAT_MRT4530_98972C.1.pep
VFGPSRCILLGHELQSVLAHIAQPLTGEGRESALEGRDAVASTLMVSQEDSVVLINLFKYSVAPHLDELLKIF

SEQ ID NO: 203826 - protein, 133 aa, Oryza sativa
  Clone ID: PAT_MRT4530_98973C.1.pep
MLKNAPSDPVPLAGGQKRTLAGTIFGAASGLALADIFTLDHGTAVCCLVAGPVMAVMGCNARKNVGHADEQTQDLWDRLGMQLSLSPLSLDHLTNWYDMIGMAQVFNIRICRFDRRATRSDHPDTSRLTITDR

SEQ ID NO: 203827 - protein, 99 aa, Oryza sativa
  unsure (1)..(99): unsure at all Xaa locations
  Clone ID: PAT_MRT4530_98974C.1.pep
AAEXAXSXMESSVTTXAXXXGLKSTAXIXVVRRYGNFXXXNVXNXXRIRXMQXXXXXGIKKFETLCYLPPXTVXXLXKQIEYLLRSKWVPXLEFSKVVI

SEQ ID NO: 203828 - protein, 65 aa, Oryza sativa
  Clone ID: PAT_MRT4530_98975C.1.pep
MGGAQWARQGTPSAQTEEPPPSLWPKTTAQQVAQQIGGYENGLPGCLLPAQCPLSCPCALPATLP

SEQ ID NO: 203829 - protein, 193 aa, Oryza sativa
  Clone ID: PAT_MRT4530_98976C.1.pep
PTRTPTRAPTRTTTRAGMPIQAEGAPRKIADPFDFGGGQIDPDKSIDPGLVYDIDPKEYTKFFNCTLTLGPKDDCESYVGQLYQLNLPSIVVPDLKDSVTVWRTVTNVGGEEGTYKASIEAPAGVRISVEPSIITFTKGGSRNATFKVTFTARQRVQSGYTFGSLTWLDGVTHSVRIPIVVRTIIQDFVSDTS

SEQ ID NO: 203830 - protein, 593 aa, Oryza sativa
  unsure (1)..(593): unsure at all Xaa locations
  Clone ID: PAT_MRT4530_98977C.1.pep
MDPLRSYLGRLLLEEITPVVMVLTTPLAEAACRKSGLSVVDMLSPFSLFKKIDVPVRTASDQPYRLQMFKIRMVYASDVRKQDYEVADQRIKPVVSEANESALPDLLSDPPQLEDVLSKPEAELCPLWIKKFNRALMRTLSFSEHETFDHPVACLLVVSSKDNEPISKFVDLFNTNQLPSLLNEGIMDPQILKHYLILHDQQDGPQEIAMNILAEMKSTLGLNDCKLLCINSSTEADGADAENSWLPYVSTENYFRLNCILTRXAVFFQIKDFMQDLASNHIIPYMEQKIRVLNQQVATTRKGFRNQIKNLWWRKRDDVPEAANGPMQVVTYILPFSLYKNSVLALSNYRLLSTDYKLDKAWKRFAGVQEMSGLCYFMLDQSRKDAEYCLDSAFSTYLRIGSSGKRNATRCGIWWAEMLKTRGQYREASSVYYRVSNEEPSLHSAVLLEQAACCYVLSKPPMLRKYGFHLVLAGNSYYISDQVQHAVRAYRNALFVYKQHPWSYINDHVHFNVGRWYGVLGIFDVAIKHLLEVIACSHQSLTTQSMFLNDFFHFVQSMGKKFDVYKLQLPVIXMPSLRVIYEXHXTYASXADS

SEQ ID NO: 203831 - protein, 252 aa, Oryza sativa
  Clone ID: PAT_MRT4530_98978C.1.pep
MEDVENKLKDYEIVREGEAEIIINKKIAANEVFYNPVQVHNRDMSVALLRTFIAKREEEHKAMMDKRDKAHNKVSQSKSSGPNGENGSTGQHDEMDVDAEKETNKVADETEDLSTEATKTPSRKVARELKAPVVLEALAASGLRSIRYAREIDVLEKVVALDIDKACIEACKRNIKFNGASAMSKIEPHLTDARVYMLTHPKEFEVDIDPYGAPSIFLDSAVQAVADGGLLMCTATDMAVLCGPNGEVCHSS

SEQ ID NO: 203832 - protein, 163 aa, Oryza sativa
  Clone ID: PAT_MRT4530_98979C.1.pep
MPNTRQSFLFELTALQCHEHGHIHHLLTSTTSPWLDELLRLMYRASSRSHVAGTLIELPRCHWARQATDNVNLEAVAQSSTADGGTGVKCEQQRAAGSSLTVASSGEQAGGSWGVNTTAASGGVINGGKRWGADPRRRWQECRRRLDGSKQRGAAESATTVTA

SEQ ID NO: 203833 - protein, 735 aa, Oryza sativa
  unsure (1)..(735): unsure at all Xaa locations
  Clone ID: PAT_MRT4530_9897C.1.pep
MTSSFADNNVNTNLNQGVSASTMLVWTQVDEIVFPVYTTVPISADLSMAENENAVATTQGDSMSKDPPAEEEIGASTTSEPEKDPSAAKPCLSDKNHEPTRMNSKNHDLSSCKVFLSAMKTPPPKVQQSRVPLRDEDKEQGATLISDRFVGVIDIDPHEPSVLHLLEDYGSSTMSTSHKVLAIDDVGTSARANAEAENQVTTPAQHIRAVNAIQRETPYDPVLNDDLARWTERFRPGAIEKYDGSTDPEEFLQVYSTVFYAAGVDNNALANYLPTTLKGSARSWLIHLAPYSISSWADLWQQFVANFQGTYKCHAIDDDLQALTQNPDESLRDYVRRFNECRNTIPEITDSSVIRTFKSGVRDCYTTQELATRCITTTRRLFEIVNRCAHADDALRRKNDKPKTGGEKKPVKDAPESSKKKNRKSGKSKTQADVLATEYADPPKRPDPQCSDTKKTWCPIHKSDRHSLEDCLVFKKSLAKHIALQKGKRVCVVEKDAEAAIQESDSAYPDSDLHVSHIFGGSTAYSSKREYKKVEREVCSMWQGAAPKMNSINLLFASTLDAMGIPRSELTPTDQPFHGITPQSSSKPLGKITLLVTFGQANNFRMEQITFDVAEFDTAYNAIIGRTALAKFMAASHYAYQVLKMXGPKGTITIQGNTKLAVQCDKRSLDMVEHTPSPPATAEPPKKRGTPSRVASQPSHGVEGQREMENVRRFHRPQQGVSQGSLPSSSNRPTG

SEQ ID NO: 203834 - protein, 1394 aa, Oryza sativa
  Clone ID: PAT_MRT4530_98980C.1.pep
MDPLRSYLGRLLLEEITPVVMVLTTPLAEAACRKSGLSVVDMLSPFSLFKKIDGDSPPRCSPLPIIVCMTLVAFHSIGFCDLMGNPLYAVPVRTASDQPYRLQMFKIRMVYASDVRKQDYEVADQRIKPVVSEANESALPDQLEVTPKVEGILKLHGIRWTLSDLLVGYQYFEFDTKWKTNKTKNHPVACLLVVSSKDNEPISKFVDLFNTNQLPSLLNEGIMDPQILKHYLILHDQQDGPQEIAMNILAEMKSTLGLNDCKLLCINSSTEADGADAENSWLPYIKDFMQDLASNHIIPYMEQKIRVLNQQVATTRKGFRNQIKNLWWRKRDDVPEAANGPMQVFAVTLFFFFNRYTFTSIESQIRVLGDYAFMLRDYELALSNYRLLSTDYKLDKAWKRFAGVQEMSGLCYFMLDQSRKDAEYCLDSAFSTYLRIGSSGKRNATRCGIWWAEMLKTRGQYREASSVYYRVSNEEPSLHSAVLLEQAACCYVLSKPPMLRKYGFHLVLAGNSYYISDQKQHAVRAYRNALFVYKQHPWSYINDHVHFNVGRWYGVLGIFDVAIKHLLEVIACSHQSLTTQSMFLNDFFHFVQSMGKKFDVYKLQLPVINMPSLRVIYEDHRTYASDADVNVSESIWQELEEEMIPSSSIVRTNWLEKSPDLRKYKDSCVCVVGEAVKVRIELRNPLQIPVVVSCISLICQLSTSLDASSAVNSVLTTGAGEDIANTKPAISTFEDDGNNFTVSKLDIVLGGSETKSVQLEVTPKVEGILKLHGIRWTLSDLLVGYQYFEFDTKRKTKKGKKGPRRTLSNTLIVIKGLPKLTGCIDHLPTNAFAGDLRLLKLNLRNQSEYAVKVCSNEHNFWSKFNGTTQFEPTTTNHTFKEGFQKTTRSSEPQNYFFYEFTLVRLLTETISKVYVVICVPYGPHTRSWSMDDLLVNVAKNIKMKLSHPRFVIPGDLSEVDFEFPQCLRKHVQSEISTVSTKRTQGDAKGLLFTFSQDIKIQEGATFSWPIWFHAATPGNFSLYISLYYEMESPSEITYRTLRMHYNIEVFPSLNVSFAIRMCSSRLKEYIVRMDILNRTPSESFILHQLSCNDSKWAISSLPLCDSIRSIETVSANQSVSCFFKIKDLGTNSCKEAENSSCRSDMLFLSREGNSNTEEFDVSQSPITNFHYQERYQQGRLAKGPRDLLDFILISKAVGGNYSKSDPDVQLLSHHVCHCSAIDQSPIWWFMEGPRTVTHDFSKSYCEANIQLVIHNTVQHNISARVVTYDSVPDKSQTVNLQDSNSNQGGWYDVSLENDIKAISTAKGTHYQKQPSESISPFVWCSLSSAQVDLKPDTSTKVPLKVCIFMPGTYNLSNYQLQWKVHSSEVGQVDENQRSGGGQGHPFYVTVLQDA

SEQ ID NO: 203835 - protein, 265 aa, Oryza sativa
  Clone ID: PAT_MRT4530_98981C.1.pep
MLRPFPSSNRTAAAAAVAVAAAPFAAASAMPHPSSSSRSAGGGHHVPSVYPPPPSSSSSSACRHTPSSATLDLLILLLVLFSVAFLLASSLAHVSRSLTPLLASPPAAAALASAAAAMPYLGAAAALAGATFLSCSRLPRRRCRNPRCRGLVKALEFDVQLQTEEAVRAGTGSTSGGADAAMWREIEALPWKGGQGGNNPDYECLRAELRRMAPPNGRAVLLFRNRCGCPIAKLEGWGVPKSKRRSKRYHYHPGSSGPKPNPIFG

SEQ ID NO: 203836 - protein, 61 aa, Oryza sativa
  Clone ID: PAT_MRT4530_98982C.1.pep
MDNCLQVSKAEFIDLARKSGKFDEDSLAFQSRLLAKSGIGDESYMPRCVFEPGTNLRHHEG

SEQ ID NO: 203837 - protein, 181 aa, Oryza sativa
  Clone ID: PAT_MRT4530_98983C.1.pep
MLCCLAALGQQNDDLAKPNRRFPPNQVLAGQFKRYADTLSLERRPHHLPSRHRQQRRDKRTVGVDGSVRNEDVRGERELARPRKEEGGRDGLAFPKGMGTEREREEKGGGGLGFAQAPCEAAIRISIGWPSQTIKESAPNSPAFQRGRTDMWTHMKVWPSEQRKNGSKDLLPIKELEHQPL

SEQ ID NO: 203838 - protein, 94 aa, Oryza sativa
  unsure (1)..(94): unsure at all Xaa locations
  Clone ID: PAT_MRT4530_98984C.1.pep
SFPPAPRSPTPGGETGSCPRDTLKLHVCTNVLGLLKDKIXGAVAADEPCCLVIDGTXDLDTVAWLWTVIKANVLGLKLNIPSDLRLILNNWGKI

SEQ ID NO: 203839 - protein, 40 aa, Oryza sativa
  Clone ID: PAT_MRT4530_98985C.1.pep
YVISRTHYSSLKIWKQQNLEKLLRTPSKKKYKQNKNRVHW

SEQ ID NO: 203840 - protein, 84 aa, Oryza sativa
  unsure (1)..(84): unsure at all Xaa locations
  Clone ID: PAT_MRT4530_98986C.1.pep
NLEPLPALNGGTMALILLEAARGGQNIHRLVVQRPTSXATLVVLMVGMFLIVRDTLHLEFIKVFLSYLGVDTLGPGYCPLQFRP

SEQ ID NO: 203841 - protein, 125 aa, Oryza sativa
  Clone ID: PAT_MRT4530_98987C.1.pep
ILKTITIDKNIIIILVLRKRYRYGRKISIPFSPPAKSQQRSEVTALVRASIAANFRPVVLAPESPSRIFPLQKTPRARPSRFLPVRSALTDSPPHLRRQLGLNPPTTRGPRLPPRRAPFHNGAGR

SEQ ID NO: 203842 - protein, 74 aa, Oryza sativa
  Clone ID: PAT_MRT4530_98988C.1.pep
ILLLHKTYSISLSPLSNKLPLPFNIPSSSHSPTSLTNSIFLNNDTLSIKNSPPHLNPSLQSFFNPYIRKKLLLH

SEQ ID NO: 203843 - protein, 192 aa, Oryza sativa
  unsure (1)..(192): unsure at all Xaa locations
  Clone ID: PAT_MRT4530_98989C.1.pep
TGPPRRRGHGPDLRSHLASFPLPPPPLARLRLLAASGDHASALDAFASVPAKPHRPAVEAFLAMVREGALPNARTXTVVIEHLAVDVDCLLLSQRARRTTRQYNVLAVALASAGKFELLRWRSGKMGSGPPLEGGGVRERRLLGVGAQVAHRGEVVVGRGRLPPPAARRRVEVRRHLVAGRRTPASHYSMSR

SEQ ID NO: 203844 - protein, 139 aa, Oryza sativa
  Clone ID: PAT_MRT4530_9898C.1.pep
ICNQLNFSLFLVAPPLQSIPAARPSIGSHPHRLIRRIHQCPGAFSIPASHHHHHHRRPCTHKQQHSCICMVSHSHLSLVSCLHCHTSLGSQLSQHSACHHIVNPASSAICQQSRPVRSVSSVCSAGSSCLCWQQCMSAG

SEQ ID NO: 203845 - protein, 69 aa, Oryza sativa
  Clone ID: PAT_MRT4530_98990C.1.pep
MSIGSCCCSDHICCSQYKNTADAAVDAVREILRQCAEFKTVKRVIHTGSISTALPLIDVPGAGFGSSGY

SEQ ID NO: 203846 - protein, 459 aa, Oryza sativa
  Clone ID: PAT_MRT4530_98991C.1.pep
MALKLLWLHADGHCQCHLSLLLRLVACLALVLLLPPPPPAQAATVVTHLPGGGGPLPFYLETGYVGVEEETGTELFYYFVESERSPRSDVVLLWLSGGPRCSVFSGFVYEIGPGMVGAEPYSGGTVPRLEYNPYSWTKWLDDHPKYLSNPFYIGGDSYAGKVVPLITQYLSEVSYVDKLIYNHLDDKIEIIYVSSLLTLVAFIQGYLVGNPSAGDKIDVNSRVPYSHSFGVISDQLYEAALANCKGDYENPTNKPCTDVMQTINNLMSEVLEPACPFDWPWPMPGRDASNRKSLTEEHYWLGDPPVEPPFSCFAAYRYYLSYFWANDNATRAALGIKEGTVTEWIRCPTGLPYTRDLPSSIECHFNVTTRGYRALVYSGDHDPIVPFSGTQAWIRSLNFSIVDDWRAWHLDGQAAGFTIKYANNLTFATIKKSRQPSAALQVYSYAPRPLLLLFIVIEI

SEQ ID NO: 203847 - protein, 116 aa, Oryza sativa
  unsure (1)..(116): unsure at all Xaa locations
  Clone ID: PAT_MRT4530_98992C.1.pep
MAPLTMALTATTVSPFQGLKSTAGLPVARLSSNCSFLNVTTXVRITCMQEHPIEDIKMMLTLFYQPPLSWRTXLDQIKYMLRSRXLPCHKHKKVGYMYRENHISTAYYVSWYRTMM

SEQ ID NO: 203848 - protein, 179 aa, Oryza sativa
  Clone ID: PAT_MRT4530_98993C.1.pep
HEETFNVPAMYVNIQAVLSLYAAGRTTGCVLDSGDGVSHTVPIYEGYALPHAIVRLDLAGRDLTDYMMKILTERGYSFTTTAEREIVRDIKEKLTYVALDFDQELKTAAESSGLEKSYELPDGNVIVIGNERFRTPEVLFNPSMIGKEANGIHDCTFQTIMKCDVDIRKDLYCNIVLSG

SEQ ID NO: 203849 - protein, 186 aa, Oryza sativa
  Clone ID: PAT_MRT4530_98994C.1.pep
MRIGNDSAVAATPHGAGYGGHLADTAAGGASFSRSAWSASTSATATSRTRPFARRLDVSRRRWHRPRLYFPPSVRACTPRPRRTSASRTSRQPGHPRQQMGSLLRRVERVQLLQPLEVWATVAAQAPLGRSRHSRRRTPRRAPTTNQGRAWSSQRRTASRRRCTGRRHDREDEQQRRRRWWEGRPT

SEQ ID NO: 203850 - protein, 561 aa, Oryza sativa
  Clone ID: PAT_MRT4530_98995C.1.pep
MYSTAISLSAAATAAAAVGGARPGAIRPAELRFCGLRREALGLRSLRAPPRAAATPRKAAAATGNGAAGSGGFDYDLVIIGAGVGGHGAALHAVEKGLKTAIIEGDVVGGTCVNRGCVPSKALLAVSGRMRELQDEHHMKSLGLQVSTAGYDRQAVADHANNLASKIRSNLTNSMKALGVDILTGFGTIVGKQKVRYGKVGFPDNEITARNIIIATGSVPFVPNGIEIDGKTVFTSDHALKLESVPDWIAIVGSGYIGLEFSDVYTALGSEVTFVEALDQLMPGFDPEIAKLAQRILINPRNIDYHTGVFASKITPAKDGKPVLIELIDAKTKEHKETLEVDAALIATGRAPFTKGLGLENVNVVTQRGFVPVDERMQVMDADGNAVPNLYCIGDANGKLMLAHAASAQGISVVERISGKDNILNHLSIPAACFTHPEISMVGLTEPQAREKADKEGFEISVVKTSFKANTKALAENEGDGLAKMIYRPDTGEILGVHILGLHAADLIHEASNAIALGTRVQDIKFAVHAHPTLSEVLDELFKAAKVNAGVPHSVNEPVAA

SEQ ID NO: 203851 - protein, 178 aa, Oryza sativa
  Clone ID: PAT_MRT4530_98996C.1.pep
MVGLDLRDSHLADTAICSATGRLAAAVASPSPLFSPKRACVYTTSTAHVCVKNVAPAGAPTSTDGFASPPRREGSAEEKNILPLHVFSDPDNSSAHIEFLHLGYVCLNTVATTAHPVPPTRPPPTARSMGHGGRPSSVGPLSSQPSENTATCTNDEPRQGLVEPTTNRVTATVHRTPP

SEQ ID NO: 203852 - protein, 257 aa, Oryza sativa
  Clone ID: PAT_MRT4530_98997C.1.pep
MRARLQTLAPALRRAASASATGPASASAAGPASLASAAPLSTAAAAAFPPPQSKTASRMGLFSMPGGDTRQPSYGDRLMESQQLPQDYRANVPRSGDTMGVGKWSRIAGGENPSYFGTPSHIFDEHKQSLVKGKRDFVYVLLKRNKTFVTVTDVRGNRKTGASAGCLEDKKGRSRLSKYATEATAEHVGRAARKMGLKSVVMKVKGTVFFNKKKKVILSFREGFRGERVREQSPVVFIHDVTQLPHNGCRLPKQRLV

SEQ ID NO: 203853 - protein, 63 aa, Oryza sativa
  unsure (1)..(63): unsure at all Xaa locations
  Clone ID: PAT_MRT4530_98998C.1.pep
XRXVMGXYXFVCRSSDEEWTNKQLKGELEDYVXTXYDXXRXXVDXXFXXDSDNVXQXXXDMVS

SEQ ID NO: 203854 - protein, 94 aa, Oryza sativa
  unsure (1)..(94): unsure at all Xaa locations
  Clone ID: PAT_MRT4530_98999C.1.pep
MRRVHPPPLPSRLRCPSFTLNVHQASSAAPSARAWPTVRAEVPAFVEXSQVELRAATGRFAAANIMSECGEKAPNLVYRGRCRRPAAPSGCSSP

SEQ ID NO: 203855 - protein, 88 aa, Oryza sativa
  Clone ID: PAT_MRT4530_9899C.1.pep
TVGPMSVPAAKLCKSPPVVRTVVGSRFRGRYDSVYCLGWMSVILTVVGCKTVACTAEKFLCGKSSRERKKHCHCVLNIVMHSLGLCST

SEQ ID NO: 203856 - protein, 154 aa, Oryza sativa
  Clone ID: PAT_MRT4530_989C.1.pep
RRLSACRASTAAMLPPLSCSSRRRSRAPPATNIRFAWIRAGDGCCRRIWPGGGPPLPPPGSSRCCSQIIAEPVRPSHVHRRHACPAVVLLLSPPLCSSYHRCQIRMDPGRGRPMSLDLAEGGPPLPPLPLATIDARGRVSRPLPPTNCCPPSHA

SEQ ID NO: 203857 - protein, 472 aa, Oryza sativa
  Clone ID: PAT_MRT4530_98C.1.pep
MVLDSNELHQHDAPDVDVSINCDDRIFGQESVNLAAIQEELLEEDSLSDLLLAGAEAVEAGDSILASVAFSRLDDFLSGIPENGAASSFDRLAYHFDQGLRSRMSSASTGCYQPEPLPSGNMLVHQIIQELSPFVKFAHFTTNQAILDAIIGDMDVHVVDLNIGEGIQWSSLMSDLARCGGKSFRLTAITTYADCHASTHDTVVRLLSEFADSLELPFQYNSICVHNEDELHAFFEDCKGSVIVSCDTTSMYYKSLSTLQSLLLVCVKKLQPKLVVTIEEDLVRIGRGVSPSSASFVEFFFEALHHFTTVFESMASCFIGSSYEPCLRLVEMELLGPRIQDFVVKYGSVRVEANASEVLEGFMACELSACNIAQARMLVGLFNRVFGVVFKKISLLMVYYISLGKNDLREPNKVIWSSLAAGCGSHGIVVLAFYAADKLLEFKPKGIETYIHPAVERAHFHKEDRMWQEYEN

SEQ ID NO: 203858 - protein, 724 aa, Oryza sativa
  Clone ID: PAT_MRT4530_99000C.1.pep
MEIDRYKMHQISYEKYMHDEEFKPLTQYKEAEPIMDNIMTEKAKLVSRALLIELYFLHKMGKCPQHFDESNVFIREDGIAEIRECNLDDKSDSKVFENYQDAHKIIVEIVLQQHKDDIPKDVKHLLNLMNNPNKAISMELEYLICTHASLVPLRNRETFFLWMYRHIMFMLPCDKPAGDMPYKSYWHKKLKGDNLLKKLFRREKDMCYKKEITDFLKSYRNAIVHGTDKYGEERIRYTPDDIQLILLITFPMLLPRMQEELWENKQLEDLQLDSLFGSNMDKEFGVIMDPSAVGSMPISANQDTNKNDIGVDSLPTKRGVVFPFRNTHHVSYAEYIRDLEFKPLIEYIKHTPVMLVGPTRQRVYRLMTEEAKFVIRALLKELYFLHKRGKCPRNFDESNVFIREDGIVQLRGSELDDKNDSLVSKNYKDAGKIIMEIVFGQHKEDIPEDVMHLLNLMNTGDKVISMDLEYLICTHASLVPLRNREAFFLWMYAFIMFVLPCDKSTEKDEIINALRKLDWGGKLQGTSLLRKFSWCKRDGSEEEIDSFLNSYRDTIYHGMDECNGNGKRYILWMFNYGYASITGRAEGVEGGWTAAASALENVAPQAEARPRGTAAMEGTEKTRTGIGGGSETARSEMRGKRKRTRSKLQQSRGQGCWPIAIHVIGPSTADARHPTAPLSGAAAAAAAIQATTAAPLLLKGERRGRGGERVGDRGEISLNYFFGI

SEQ ID NO: 203859 - protein, 63 aa, Oryza sativa
  Clone ID: PAT_MRT4530_99001C.1.pep
GTRQCDARDAPSLSRPAPHPRRAVSFYSNPHRPTIHATTTPSVVSSRRLPRVSCLGALRRGAR

SEQ ID NO: 203860 - protein, 229 aa, Oryza sativa
  unsure (1)..(229): unsure at all Xaa locations
  Clone ID: PAT_MRT4530_99002C.1.pep
MCSRPLEDSFLLPLSVQAYEEFLLMEEELSLLHLXPGQGDSWSFIWNSGTYNSKRFYKLNFMPLQPPRPYIWLWKSKCVMKIKVFAWLLFSDMLNTTDMLDRRHCAKENADLTCVLCNGGQRETGLHLFFTRPFSVRCWRHLGITWNQHMEFFQMIVLSRLNFARMGFLEIFFIASWHIWKQRNRFIFQNVVXLFQSWRSLFKNEILLHMCRMKEPLEQLVXFDWLQPL

SEQ ID NO: 203861 - protein, 129 aa, Oryza sativa
  unsure (1)..(129): unsure at all Xaa locations
  Clone ID: PAT_MRT4530_99004C.1.pep
MSMMTSSPAAARHLVLAGERRRGGANGGHLRVEGDTANSPRARTTADGNRRRRRRGRSGGDVRVEDDGDAPAVFGENGXRDEDGNDLANPTAAFPSDDDDRSGGGARLDLLRRRRRKANAEAALQAAAS

SEQ ID NO: 203862 - protein, 96 aa, Oryza sativa
  Clone ID: PAT_MRT4530_99005C.1.pep
MALAAGSAKAGEEKSRVKVANCGHSRGGMSPWCSTPASPLPPSAMLTCTAPSPGTSYRRVSPSSCTLWPEIDCDDIACTRSFGCPSGMRTNRATTT

SEQ ID NO: 203863 - protein, 371 aa, Oryza sativa
  Clone ID: PAT_MRT4530_99006C.1.pep
MGCFSCCGADDVGKKKKRDDPYVPIPDPGGNYGRSKPGPPAPSRSPPTSRNLPIAVPAIPLDEIKGITKNFSSDALIGEGSYARVFFGVLRDGRRSAVKKLDSSKQPDQEFLVQVSAVSRLKHENIIQLIGYCAGGSIRVLAYEYAPRGSLHDILHGKKGVKGAQPGPALSWMQRVKIALSAAKGLEFLHEKAEPRVVHRDIKSSNIMLFDNDVAKVGDFDVSNQSPDMAARLHSTRVLGTFGYHAPEYAMTGQLSTKSDVYSFGVVLLELLTGRKPVDHTLPRGQQSLVTWATPRLSEDKVKQCVDPRLEGDYPPKAVAKMAAVAALCVQYEADFRPNMSIVVKALNPLLNSRPNNRPASFTDAGERSGL

SEQ ID NO: 203864 - protein, 144 aa, Oryza sativa
  Clone ID: PAT_MRT4530_99007C.1.pep
SLPPCPTFAAAAAGRSSASSAAARSSTATPGAAADDTAPAPSSPPPPLLPARRWPPPRWSAAESPARRRALLDPLLLFLSLFLMDSVLASDALGASDSAIGDLGKLTTRLSPLPPPPPPPIEDFRRRSRISDSESPPPRAPSCR

SEQ ID NO: 203865 - protein, 60 aa, Oryza sativa
  unsure (1)..(60): unsure at all Xaa locations
  Clone ID: PAT_MRT4530_99008C.1.pep
PMLDGNRRSVASMYNPALETTISPTVXGGAGVVGQYLEYVFGEYMYVYAEQKFDAKEPRF

SEQ ID NO: 203866 - protein, 79 aa, Oryza sativa
  Clone ID: PAT_MRT4530_99009C.1.pep
PLGSQTGERRWSPCRPLLLYPRPLPPPLSPRPLPPPPSPRPRHPSLLQCSPLPPRRPRRPLARSPSRSWNSWPLPSPPR

SEQ ID NO: 203867 - protein, 112 aa, Oryza sativa
  Clone ID: PAT_MRT4530_9900C.1.pep
MGKKQIHWSLHRCHLAATLRQAGRAQRTRRSPAAAAAASAARHARPPPAPPQLHPPPAAAVALLPPAVACAATTASAARDRAYVGEGSAVASGEGRRGKGRKGEEEKKEMRR

SEQ ID NO: 203868 - protein, 172 aa, Oryza sativa
  Clone ID: PAT_MRT4530_99010C.1.pep
RLEIETMTDNIRATLKSHLIFLRQQGIVGVSVHNTLFEKTINLPPQKIDMKYLPPQKIDMGDENRSTVGHSRSQHLRSLSDSCIDWSELAVNPKAKPVRNTSFRVEKVEVDRTVKIEAKRAELECKTKLYEHIKEAAHDSGANVLRQMKAIEKEISELTSQEEIEEKKRKGG

SEQ ID NO: 203869 - protein, 737 aa, Oryza sativa
  Clone ID: PAT_MRT4530_99011C.1.pep
MAPFLASPIRLHPCPLLFSHPHLFGSDYFAFSVKGRGAHLESMRVENKRGNRSWGTDAKRTHPNSIFNQLVRYGYIGTGFPDMNCSLTWSLIGGPSTLSLPSFFPSAHLLLSLALFFFLCIQSNHRMSKSGCERCRGRGFWDTDDQDTYFFKVMIGGFRRQMTIPYKFAENFRDQIQGTIKLKARNGNTCSVLVDKCSNKLVLTKGWAEFANSHDIKMGDFLVFRYTGNSQFEVKIFDPSGCVKAASHNAVNIGQHAQNMQGDPIEILSCSDEHLRAQSLTTERQNQPEKDVIDNCNKKMKTEHASSSEDDQETPTAEVHRMKVEEMVRAIHSNHPVFVAVMKKSNVTRQPCYVAISRKYANEYFPGGDQMLTLQRHGKRWQVKFCISKRKLRMLSKGWRKFTRDNELQHWAPLALFITLFFSPHFRKMKKCGQKMRKLNTRSTARDDQEKYFFKVMIGDFHKRMTIPDKFARHFKGVISKTIKLEPRSGYTFDVQVTKKLNILVLGSGWESFVNAHDLNMGDFLVFKYNGDFLLQVLIFDPSGCEKSTSCSMENAIDHVGQGWKEHNDISTSYHDQPKGNKHWMQKDSSSKGNKIGNTRSSNTPSKFSGCILPRGTCLPVVQEKKMKEKIQAIHSKTPMYGNVMTKCNVSGSPCVLEITQLYDDAYLPFNNGQELMLRHRDKSWKVRFYRFKNKSRKLTQGWKRFVHDNYLRMGDLCLFEILKNKYTMNVHIIRKC

SEQ ID NO: 203870 - protein, 238 aa, Oryza sativa
  Clone ID: PAT_MRT4530_99012C.1.pep
MEEVLAEEEIEEAVDEAAAELSEAREQTPPADIPAPQRTPPTPIALARQTRQKKSAGRKKPAPVPSPAPSPSPPSPPAQPASSEHTPSAASSHNVEEEVQAPPTITKARQRIADRRERKDIEATIQANRLSVNKEKARLDQLSIGPVPIQSNIDRLESRRIEVLAQLEECNTELALKRQKLADLPKVVEEQKLKLKATIRNVADLTKSLKFVPGTDAQDEVEQIRQRAISAIQRYLAD

SEQ ID NO: 203871 - protein, 527 aa, Oryza sativa
  Clone ID: PAT_MRT4530_99013C.1.pep
MASAAAAYGVGAPLKLAARRHGALALAGSHRCSGWKSSVSCPVPQAWMGSCSSVAMRRVASGSRLIVQASNSGGSSLKASLADASLLTEERITVLVIGGGGREHALCYALNRSPSCDAVLCAPGNAGIAQSGDATCISDLDVSDSDAVIAFCCKRGVGMVVVGPEAPLVAGLVNDLVKAEIPAFGPSSEAAALEGSKDFMKKLCDKYNIPTAKYRTFTDPAEAKQYVKDQGAPIVVKADGLAAGKGVVVAMTLDEAFEAIDSMLVQGSFGSAGSRVIIEEYLEGEEASFFALVDGENALPLESAQDHKRVGDGDVGPNTGGMGAYSPAPIVTEELKHTIMDSIIIPTVQGMAAEGCKFVGVLYAGLMIEKKSGLPKLIEYNVRFGDPECQVLMMRLESDLAQVLMSACRGELGNVSLTWSPEMAMVVVMASEGYPGSYKKGTVIRNLEKAEQVSPAVKIFHAGTALDGDGNLVAVGGRVLGITAKGKDIEEARARAYDAVDVVDWPEGFFRRDIGWRALKHKQVANY

SEQ ID NO: 203872 - protein, 55 aa, Oryza sativa
  Clone ID: PAT_MRT4530_99014C.1.pep
FYDDVTVKTTVTTYKFRSNVPCYCTSAIILLPNHSNKVKQRKGKRIDLGRRKNMR

SEQ ID NO: 203873 - protein, 986 aa, Oryza sativa
  Clone ID: PAT_MRT4530_99015C.1.pep
MALLEDRSAIPISLGAYLKLHHPLLLIEHYTLVLPYLAFTYTSRHSILSMADAVLPAFLQVLFQNAMELLKKKLEFACDIDNEGQKLMSNMEMIQAVLRGGEKMKFNDEQRLWFSDLKDAGYDAMDVLDEYLYEVQRLLPILGEAYIGKTTVAQLIINDKRVSRHFDVRIWAHVSPDFNIKRISASILESIYDKSHYDNLDTLQKHIQKRLRGKRFLLVLDDYWTENWHDWEEVKRPLLKASAGSKVIVTTRSGAVAKLLGMDLTYQLKLSIETSIKLKMEVLQKCNGVPFIAASLGHRLHQKDKSKWVAILQEEICDANPNYFIRARQLSYAQLHSHLKPCFAYCSIIPREFQFEEWLIKHWMAQGFIQSKPDAVATGSSYFRTLFEQSFFQRELVHHSGERHRYSMSRMMHELALHVSTDECYILGSPGEVPEKVRHLTVLLDEFASQNMFETISQCKHLHTLLVTGGNAGYELSIPKNLLNSTLKKLRLLELDNIEITKLPKSIGNLIHLRCLMLQGSKIRKLPESICSLYNLQTLCLRNCYDLEKLPRRIKYLHKLRHIDLHLDDPSPDIHGLKDMPVDIGLLTDLQTLSRFVTSKRNILDNHSNIKELDKLDNLCGELLISNLHVVKDAQEAAQAHLASKQFLQKMELSWKGNNKQAEQILEQLKPPSGIKELTISGYTGISCPIWLGSESYTNLVTLSLYHFKSCTVVPSLWLLPLLENLHIKGWDALVKFCGSSSANFQALKKLHFERMDSLKQWDGDERSAFPALTELVVDNCPMLEQPSHKLRSLTKITVEGSPKFPGLQNFPSLTSANIIASGEFIWGSWRSLSCLTSITLRKLPMEHIPPGLGRLRFLRHLEIIRCEQLVSMPEDWPPCNLTRFSVKHCPQLLQLPNGLQRLRELEDMEVVGCGKLTCLPEMRKLTSLERLEISECGSIQSLPSKGLPKKLQFLSVNKCPWLSSRCMVLGSTISSLWIDGELIRY

SEQ ID NO: 203874 - protein, 76 aa, Oryza sativa
  Clone ID: PAT_MRT4530_99016C.1.pep
TLKVTLDIKYCYSTTHLALWSQTTSPMQPKYTLSLRCSNKAIKYNTFTVFLCTPIKYTCQLLNIVTSTTSRCCYSI

SEQ ID NO: 203875 - protein, 71 aa, Oryza sativa
  Clone ID: PAT_MRT4530_99017C.1.pep
CPSLWDFFLTSFRAGPGFSPPPYISSPILILLFPWGFLDVRPLKPCINPACFKLFLFSPSIIYAWAVGPAF

SEQ ID NO: 203876 - protein, 75 aa, Oryza sativa
  Clone ID: PAT_MRT4530_99018C.1.pep
TGAQPFAQPVPPIASSAQPTVPPLTPLPAPAASAPGQPIQLLTREQPQHTRHQAAQTIQQTPPRHQVAQPTQQMP

SEQ ID NO: 203877 - protein, 113 aa, Oryza sativa
  Clone ID: PAT_MRT4530_99019C.1.pep
PDDLIFFFLRETHRGRQTLDTQEYKTNRKNNGPAPGKQGGTKKTTCTRKEGNKTNWDQGQKQIKRPQPPKGHRGATGKGNQQQMYPQHNTEGPSLKGNRGLTPPHQNIMKTQY

SEQ ID NO: 203878 - protein, 366 aa, Oryza sativa
  Clone ID: PAT_MRT4530_9901C.1.pep
MVPPAYRNTNARKQLKRKRCNAGTDEHDGCPLHDEVLLLVMSLLVPDIADLVSLALGFFFTSTGAGTITTPDHNNYMPLRFVPLRPSSSPRRRRRRLCVCNPITGEVDVLPHLRGSDRPPRLYACALLTVDDLQYFNLGNDEDDHYTTSPSSYRVVLMYNRRGFTAARWFASGSGQWGAEVRAEGARAGRMRQHTAAAMVVHRGMVVWPRLKLALLRLPKAGVRGVYRTEGSLLGSLPDGRLCWAEVSWDKTRIRVFFTHHHHYHGLADMMVSLLESPYSGQRWQRERSVVIPRSSCHCQRVKLRWFCEKSGLILFTADYRCYTLNLETMEVDMVAGFGIQGDVDNMCGPGSAPLLTCSHIFHIYY

SEQ ID NO: 203879 - protein, 74 aa, Oryza sativa
  Clone ID: PAT_MRT4530_99020C.1.pep
LLLLKVSAKKLRNKFLVYGPMCAVIAVMISTDDVKLHLNVGPQLYPWFATQCYPLFGGSFKKKKKKPKKKKKTK

SEQ ID NO: 203880 - protein, 68 aa, Oryza sativa
  Clone ID: PAT_MRT4530_99021C.1.pep
WGDLHGGEDLGGRPIAPTASGSPPPPPPSPARQPAASASSPPPSPRHTTSPAANPRPWRPVRLMGFAV

SEQ ID NO: 203881 - protein, 138 aa, Oryza sativa
  Clone ID: PAT_MRT4530_99022C.1.pep
MAWSYYLCLLRSIPGKMMLGRQWKPGCSCWSAMRKLQGAEKEEMLRTMREMEAKLDDEIAANLHAINAHTSSHQHGFFNCKLTAMGVPKGKFREEVVGEINIAAMFCVGFLLASSSTERIMDKYITPQRQSPAQETKN

SEQ ID NO: 203882 - protein, 83 aa, Oryza sativa
  unsure (1)..(83): unsure at all Xaa locations
  Clone ID: PAT_MRT4530_99023C.1.pep
QSPAPLAESRSCKXAFPLVXGXNPHXRRAXXDXNVRXGDNXXXXKVDNVHEAARETQXYXIKSGIXPSIKXXLXXSXTXISVI

SEQ ID NO: 203883 - protein, 71 aa, Oryza sativa
  unsure (1)..(71): unsure at all Xaa locations
  Clone ID: PAT_MRT4530_99024C.1.pep
FFAXKYGXXEVXRLVCCNSXXFXXXXXNXQAXQXXIPXEGXRXXXRAGGXXNXXLQXGHXTXEVADXKXGG

SEQ ID NO: 203884 - protein, 567 aa, Oryza sativa
  Clone ID: PAT_MRT4530_99025C.1.pep
MASAPPVQEEPLQPGTNHFRSLLAAAVRSISWSYAIFWSISTSCPGVLTWNDGFYNGVVKTRKISNSADLTAGQLVVQRSEQLRELYYSLLSGECDHRARRPIAALSPEDLADTEWYYVVCMTYSFQPGQGLPGKSYASNASVWLRNAQSADSKTFLRSLLAKTIICIPFTSGVLELGTTDPTFIIAYACHNMEQVLEDPKLVNRIVAYFQELQFPICLEVLMSTSPSPNETEDADIVSEGLITHNAIEEGQMVVSDECVSNANRDPITMEIDELYSIYEDLDLDMDLDLDTVRFLEDNGWPVNPSSFQLVPASSTEAVAAAAAANDVDGVANSQVSCFMAWKSAKSNEMAVPVVTGIESQKLLKKVVDCGARMSTGRGSRAALTQESGIKNHVISERRRREKLNEMFLILKSIVPSIHKVDKASILEETIAYLKVLEKRVKELESSSEPSHQRATETGQQRRCEITGKELVSEIGVSGGGDAGREHHHVNVTVTDKVVLLEVQCRWKELVMTRVFDAIKSLCLDVLSVQASAPDGLLGLKIQAKFACSGSVAPGMISEALQKAIGG

SEQ ID NO: 203885 - protein, 328 aa, Oryza sativa
  unsure (1)..(328): unsure at all Xaa locations
  Clone ID: PAT_MRT4530_99026C.1.pep
VVNLVAHTFIHITTTADGARAGSGNIPGSACIPLLILLLLRVLLLHSYAHRSPAYCPGYFLKQEVXRWRVFYEGGHTVWGPEHXTLSLAQSPVSVWMDRGXGSRFVPKRLSWNGYFRASMGPQXGYTPGANTPSHSGSTKPAGAGSSQGDLTGMATSPLALSSPPATPSVRGSGDGNIVGREMRFHLWFDPTAGFHHYAILWNPDHILFLVDDVPIRRYEKKVEVTFPDRQMWAYGSIWDASDWATDGGRYRADYRYQPFVSRFADLKVAGCATAAPPACSPVPASSGGGSAALSPQQEAAMAWAQRNAMVYYYCQDYSRDHTFYPEC

SEQ ID NO: 203886 - protein, 137 aa, Oryza sativa
  Clone ID: PAT_MRT4530_99027C.1.pep
MTEAEGGQARILLRATGCCGAAIGGGRNSTIRCGFSIYWEGIDLCVGRAASHRICEAHSRRYRFLVGVVHHPPSMPFTAGWGHRVRGRIEEAAAHHRPHPLVPTPAIAVVHARRCRQCSPFRTEERGKEEPGKEEIR

SEQ ID NO: 203887 - protein, 41 aa, Oryza sativa
  Clone ID: PAT_MRT4530_99028C.1.pep
MRAFYNGVEPTTLPSVWLFGFVTGNVSAVGSDFRLRHADAE

SEQ ID NO: 203888 - protein, 131 aa, Oryza sativa
  Clone ID: PAT_MRT4530_99029C.1.pep
MPPPPHGHNPCFLMKPPLPPPSSLTLSHASASSLVPSCGSLAALRLRGGPIPDRVSDGMAAFAPLQFVLCRSSQKRVAQSFNPCRQGTPAARIAAQSPRVPLELDECPRGRVDAHHKFAVTIGGGVSVAKA

SEQ ID NO: 203889 - protein, 186 aa, Oryza sativa
  Clone ID: PAT_MRT4530_9902C.1.pep
STKETFVWTKGFRYVFFGSKACTRCGEIGHVASMCLTLCPHCEEDHPPGECPIRKVTCFLCEGTNHVPKDCQLSVLLTKTAEIQRTTLRLSRQLVSSNNNIDDIIHSTNAPLAPPNSAINHGNNTFSTNHSLHRQPQQRIVVDGRSCVSPRPTPGQAKGNQPPEGDTKQKTVIRFNQQSEGSFSCE

SEQ ID NO: 203890 - protein, 308 aa, Oryza sativa
  Clone ID: PAT_MRT4530_99030C.1.pep
MERYEVMRDIGSGNFGVAKLVRDVATNHLFAVKFIERGLKIDEHVQREIMNHRSLKHPNIIRFKEARFFFQQLISGVSYCHSMQVCHRDLKLENTLLDGSVTPRLKICDFGYSKSSVLHSQPKSTVGTPAYIAPEVLSRKEYDGKVADVWSCGVTLYVMLVGAYPFEDPDDPRNFRKTITRILSVQYSIPDYVRVSADCRHLLSRIFVGNPEQRITIPEIKNHPWFLKNLPIEMTDEYQRSMQLADMNTPSQSLEEVMAIIQEARKPGDAMKLAGAGQVACLGSMDLDDIDDIDDIDIENSGDFVCAL

SEQ ID NO: 203891 - protein, 48 aa, Oryza sativa
  Clone ID: PAT_MRT4530_99031C.1.pep
TLARARTSKFLVCNLSCSVPRWLQPVRWPCARGLPLGPPILACSSVRL

SEQ ID NO: 203892 - protein, 124 aa, Oryza sativa
  unsure (1)..(124): unsure at all Xaa locations
  Clone ID: PAT_MRT4530_99032C.1.pep
ANFQHSGESIDEHVQREIINHRSLKHADIMRVQGVMEYAAGGELFERICNARRFSEDEARFFFQQLISGVSYCHSMQVCHRDLKLENTLLDGSVTPRLKICDFXYSKSSVLHSQPKSTVGTPAY

SEQ ID NO: 203893 - protein, 252 aa, Oryza sativa
  Clone ID: PAT_MRT4530_99033C.1.pep
MSPLAKKRMMLDAPSPVQYRVPPQSPHAGRDGDSSRSHVPAPREQWGKKAQRPSPSERTTPPRAAVVPRARACRRRRVTRRGRPTDRWLPGPRAVVAIVVRCPCAAGRDGHCIQHVRVRPSRLGREPLLIFCVVSFHPHVVTGVRVPVTGRYVVVDTGETDRLGQERIQSAGPRPPLLPPCTLRLSLIRIATTLLLCCRSHKIHARVRGSGHKSGPPPRPDRSQENVPLRSYALREKPQPALLRYRARLLCA

SEQ ID NO: 203894 - protein, 529 aa, Oryza sativa
  unsure (1)..(529): unsure at all Xaa locations
  Clone ID: PAT_MRT4530_99034C.1.pep
QICRSLSKHIKPPCPQIQQRRVQTRNVAEGQGPEGTPDRFVGIIDIDPHKPLVLHSLEDQESSTSHTPRKVNVIEEQGTSTRVAPDHTRTPTQHLDIINSILIEGPFDPDLHHDGDQWVQRLRSTVANLNNAMEVDGIVNATSDHPSCDPGHNPRNAREPRQQTPPPHGNHDIHDHLNGRQREPRDQDDTHRHQRRSPHRRNNDGNXGGRSDENRDREDRQSHRDDSERGRRAQGDIGXGRHDHDDDRRHRDSCSPDSRRDXQQGRQPWDRMPNPSDPSSSSSSSSSAGAPRRQHGHRPPLLPGGGXRVFTPTLREVRWPEKFXPVAIEKYDGITDPEEFLDIYSTVLYATGAYDNVLANYLLATLKGFAHSWLIHLPLXSWEDLWQQFVANFQGXYKRHAIEDNLHALMQNPGESLRDYIRCFNECQNTIPEIADASVIRAFKSGVQDRYTTQELATRRITFARKLFEIVDRCAHADDALRQKDGKGKTGDEKKTTNKDTPESSKKRNRKSGKCKAATEVLATDQAED

SEQ ID NO: 203895 - protein, 84 aa, Oryza sativa
  Clone ID: PAT_MRT4530_99035C.1.pep
CPGGHRLAFLLRLLALDYRSWSSGIPDLLLGGFLNEKEAGEVNLVGVKGPRAHLFDQQRAWKLVLMDFGFDVEVCKVSPVFKRR

SEQ ID NO: 203896 - protein, 84 aa, Oryza sativa
  Clone ID: PAT_MRT4530_99036C.1.pep
MLTGRESLVRLIGRRRRSPLPAALALAVPPSRSLQDDAADAEREAAAGGSSSGGGDAAGAAGWVACPVCGESIRGTDYCVNTHL

SEQ ID NO: 203897 - protein, 159 aa, Oryza sativa
  Clone ID: PAT_MRT4530_99037C.1.pep
YRSGEEAREGRGRHPNEEERGRRCEDGERWWGSNSRWPCASNGTSTSSARAPQPRPHPPARGSSSATSRPLSPTTSSCGRSRLCVPPRSRQVKKLKEEALPASLALAPATKSTSSPLPTTVAAVVGELLERRRCARTERRIRRTRRMGEGEGSTSCRIP

SEQ ID NO: 203898 - protein, 44 aa, Oryza sativa
  Clone ID: PAT_MRT4530_99038C.1.pep
MAHWPASRDSRAGSWKASRCIRFVYVHDASGYEHVYVHEASYQV

SEQ ID NO: 203899 - protein, 709 aa, Oryza sativa
  unsure (1)..(709): unsure at all Xaa locations
  Clone ID: PAT_MRT4530_99039C.1.pep
MLTGRESLVRLIGRRRRSPLPAALALAVPPSRSLQVWSNLARRGELTHPRHRRFHRSHRFCSGSFCVLQDDAADAEREAAAGGSSSGGGDAAGAAGWVACPVCGESIRGTDYCVNTHLDICLTRGTKRKLTQSTLLDFSFSRKATDDYALNNLNTSDEAEHMGQTDGNVVRDGALFSVDNDKVQLQEGYECEQMLGYLPRELAKVLAPLLDRHYIECEGCVVGVPEQQLDHVPIQLKCQKYTDENETYDDLKHPQFLWENFICAVGNGNLLQPSSYIDMISCMDDLSNYDLKESSKRITSAAHADMSFLAPFCIYIVMEPAQFYQSEFXWTGTCIRTSDWHRYTDAIRVLKRLLSTVASDRKRGYWALRLSVDLEHMNRSNESLSIAEAGVIDPWVRAGSKIALQRRVVRLSKPPRRWKVPSYANAVTTNIKEVNIEGRPLNCETGAKNVFYGYDGELCGVEQLALQYYADEGGGWRGTHSEGGIWMTIFGLLMWDAIFSDVPDVFQTKFQTAPLDLETDEFYRSRKDLIESQLKKIQDGIAEEILISSWELHQGTSCRGVNWDRHSLTDLRAAVVCTGGHRLASLLRHLALDYRSWSSGMPDLLLWRFLDERGGGEAKLVEVKGPRDQLSEQQRAWILVLMDFGFDVEVCKLEPRSPHVASWSPHHLLEEEPMNRRSVEGPSLLAEAELAHREQQQAHTGLPELPRHY

SEQ ID NO: 203900 - protein, 485 aa, Oryza sativa
  Clone ID: PAT_MRT4530_9903C.1.pep
MSMSRDPLVVGSIVGDVVDHFGASALLRLFYNHREMTSGSELRPSQVAGEPAVQITGGRDGRALYTLVMVDPDAPSPSNPSKREYLHWLVTDVPEGGDTSKGTEVVAYESPRPTAGIHRLVFIVFRQTVRQSIYAPGWRSNFNTRDFAACYSLGSPVAAAYFNCQREGGCGGRRYSRPGEGSAAEDEGAVEVLLRTWPGMRPSRSNGRASSRRGKLCGGTEQDGSSVDGVAEHAAGADQRASCSERCCLLLFNFSSCFCLAAAHAPELARRSRGLAWPDWLGPVLLHGMANAHSMANASLAWLRRAWRGAVAEDRAARSWPGLAGFAEESSDARAEARGRAAGADAWAFQSCHSSIHHLSEPLPPPRTASSQLACRQRPSQAALAGDSSDGGHEMVVEAVSDMGDPQVTPSLHLEQHIVTHGDRRFAMPARLPRALFPITKPLALPSPSHWVTVVTPARHVPIPCPLAIPVTPPRPPSPIASPSP

SEQ ID NO: 203901 - protein, 208 aa, Oryza sativa
  Clone ID: PAT_MRT4530_99040C.1.pep
MEQFHDGHHVWLRSRANGLYLCADDDRSGVSLQQDRASVHAAWAVHILHFNGGDVLMLHSAANGRYLAAYRAEGSWNVERLNLNRLPSLTFSWYALGSRYGDDVLLRHFKSMFFLRALFRRDRISNSGAVGLCAMDRGTTTMQWVVEAIPPRESIPTLPDPLPPSSLSGVYRIWYVRANPDGIISPNDWRLFLFYAADRLRYPNVDAA

SEQ ID NO: 203902 - protein, 866 aa, Oryza sativa
  Clone ID: PAT_MRT4530_99041C.1.pep
MGSTSTSSIDDFVFPLGQTFRFGSLDFITNSFGKISLLNSDSNQSGGDGISAPFAIPHSTADLWEAKYEVLVASSRTTGGKPLTCIPQAAADLEVGVILQPLSSCSTDEIASYLSSPNIGSQAKPEIVNYNNDFDFDNFACYNDYYDDYYGDLNDDYTSLYFGVFMTNNETDEQRAARLADEERTRSATVVDDTNVFLTPQQNAVGAITLIDTILPEAPDYVTPTLNRMKAMIAATLPDDYSGTVGNRGPRVDHEQQKSSHGLVDLREALNARRRARHGRGHHHSTECIDGNDEGVTAFTRDLRRVNWPASFKPTGIEKYDGKTNPESWLIVNWLAGLLRGTIGSRGELRDHFIANFEGTFERPSTHFELYNVIQKPNEPIRDYIRRFSEKRNKISNMTDGNIITAFTKGVRNELLIGKFGRKPPRTVKEMFEKANEYAKADDAVLASKQSGSGWKPKKDSGNNGASSSNTHHKDRKCKPEDLDSRKELNHIFGGPLAYESKRKQKLTDREINAVQPELKRTLIDGGRALNILFAKTLDEMQISRIELRLRNAPFHGVFLVFSSTPLGQITMPVTFGTGENFHTDNVCFEVADFETAYHAMLGRPALAKFMAIPHYTYMMMKMPRPRGVISLRSDVKQAITCDKESCEMAQSCEQALGREEVCLATSTSPEGDVPAKNLSKSRENDAKTKKIPLDPLDPSKTTVIGVELDLMRHFIKEVFHPDWLANPVLVRKKTRQWRMCVDYTDLNKSCPKDPFGLPRIDQRRFTTQVGCNVEAYVDDVVIKTKHKDNLIADLEEMFANIRAFRMKLNPEKCTFEVPLGKLIGFMVSHRGIQANPEKINAILNMKPPSSQKDVQKLAGCMAALS

SEQ ID NO: 203903 - protein, 721 aa, Oryza sativa
  Clone ID: PAT_MRT4530_99042C.1.pep
MEDPTGARRKTISGGDWWHTSGGRDGPRGGDANGGGGLARQRPYRRRRVAGDGGGGGGARVLGARAIEGVGEDGEMGETREGARMYVVVICEDDFVVVGKECKNQYLPVRFHFGGDFFNNGRETFYVGGSEGMSFIEHDKVYLPEIIGHLKDHCDVLPGMLLHWLFPSKGLVDGLRVLVDDKVCDYMSICVVDSGVVEIYVETVMADEANESGSKDDSDFEDELEDMSPVDDECDGGHDDSDDEVFEPVREILVIASTPEKKRYRKKEDEEVKQIRKDCNEFKKKLKDGELGNLDDVIYMGSASQANERALVQIDGEDTASPYENSSSADDDSYEENSDGQLVTKKSKYPIFNPNKPTVTLALGMKFDCKKDFKEAVIKLALENHRFIRFPKYEGCRTRAKCDWQTCPWVCLLSKNSRTDSWQIASLVDEHNCPPRKDNHLVTYKRIAMKYEKMITDNPSWSIQSMQSTVSKQMFANVSVSQCKRAKAYVMKKIYESTRGEYSKIFDYLLELLRSNPGSIVVVKLDTDQPAPVFKRIYICLAACKNGFLVGYRRVVGLDGCFFKGATNGELLCAIGRDANNQMYPIAWVVVEKETNDSWDWFCDCCSRTWELVKVMAGCSFQTSRKEPSSEHRNCARHIYANWKKRFSKKQWQKMFWWCAKALNMMLFNLAKAKLAQETVEGARAIVSIDPTHWSRAWFRFGSDCDSVVNNICEIFNKCIV

SEQ ID NO: 203904 - protein, 112 aa, Oryza sativa
  Clone ID: PAT_MRT4530_99043C.1.pep
IVNYNNDFDFDNFACYNDYYDDYYGDLNDDYTSLYFGVFMTNNETDEQRAHDWQTKNGQDDTNVFLTPQQNAVGAITLIDTILPEAPDYVTPTLNRMKAMIAATLPDDYSGS

SEQ ID NO: 203905 - protein, 1109 aa, Oryza sativa
  unsure (1)..(1109): unsure at all Xaa locations
  Clone ID: PAT_MRT4530_99044C.1.pep
PTTSAHHQLGSRASWSNSRASHSSWGLREQLVHSPAVGNRGPRVDHEQQKSSHGLVDLREALNARRRARHGRGHHHSTECIDGNDEGVTAFTRDLRRVNWPASFKPTGIEKYDGKTNPESWLIVYTLAIRVAGGDNKXMANYLPVALANXARNWLAGLLRGTIGSRGELRDHFIANFEGTFERPSTHFELYNVIQKPNEPIRDYIRRFSEKRNKISNMTDGNIITAFTKGVRNELLIGKFGRKPPRTVKEMFEKANEYAKADDAVLASKQSGSGWKPKKDSGNNGASSSNTHHKDRKCKPEDLVAATSTFQHQRIRVNTXDKIMNAPCSLHPNSKHAAKDCFVYKQFAKQYVAQFKKPTXGKLTRQHXKKDDTEPAQGTLQDSRKELNHIFGGPLAYESKRKQKLTDREINAVQPEVPQFLQWSEVAIXFDRSDHPNRVVHPGRYPXVLDPVVRNVKLKRTLIDGGRALNILFAKTLDEMQISRIELRLRNAPFHGVFLVFSSTPLGQITMPVTFGTGENFHTDNVCFEVADFETAYHAMLGRPALAKFMAIPHYTYMMMKMPRPRGVISLRSDVKQAITCDKESCEMAQSCEQALGREEVCLATSTSPEGDVPAKNLSKSRENDAKTKKIPLDPLDPSKTTANKDIFAXKPSDMPGIPRXEDAKPIRQRLRXFAQDRRDVIKKELAKLLMRHFIKEVFHPDWLANPVLVRKKTRQWRMCVDYTDLNKSCPKDPFGLPRIDQVVDSTAGCELLNFLNCYXGYHHISPKKSDCLKTSFITPFGSYCYFIMPFGLENAXATYLRMMQRRFTTQVGCNVEAYVDDVVIKTKHKDNLIADLEEMFANIRAFRMKLNPEKCTFEVPLGKLIGFMVSHRGIQANPEKINAILNMKPPSSQKDVQKLAGCMAALSXFVPRLGEQWMPFLKLLKKTENFQWTPEAXKAFEDFKNFLTTPPVLASPHPQEPLLLYVSVTSRVVSMVLVVEHEEEGYVQKVXGPIYFISEVMADTKTRYPQVHMLLYGVLITVRKLAHYFQSHSVTVXHNRGATGRITKWALELMALDLTFKAHTSIKSRALVDFVAESQTDVPAEKLEYCTMHFDGSKRISGTGEELC

SEQ ID NO: 203906 - protein, 58 aa, Oryza sativa
  Clone ID: PAT_MRT4530_99045C.1.pep
FFFSDIVRVRVCSTIYIQESITINSRKLRGSGRLLRQSIKKILTSLYSTPLRESYSIF

SEQ ID NO: 203907 - protein, 96 aa, Oryza sativa
  unsure (1)..(96): unsure at all Xaa locations
  Clone ID: PAT_MRT4530_99046C.1.pep
FFQVQIVLENLETKKIVLVHGEGFGAWCWYKTISLLEEAGLDPIALDLTGSGIDNADTNSIATLADYSKPLIDYLNKLPENEKVILVXHSCGGASV

SEQ ID NO: 203908 - protein, 533 aa, Oryza sativa
  Clone ID: PAT_MRT4530_99047C.1.pep
MKRKREAAAAAVAVADGETTTAAARADSSSSSEGGSVCDDVVRNIFARLPARDAVASMALSRRHRRLITGEEFRRLHCRHGAPLPRPHVAYVATADVVAHRDTAGRVDSLERWAHQRAARGFSTGAFASQSSYDAAPHRSLSYHGFHVAGAAAAAGRRGGTNPMRALAGQKYDNHKYVGTCNGVVLLADKEPSVGFLLNPAIADGERKVSVVPSSPDNDTKYHISGFGYGPRTRTYKLLLCKHKSVANFKRLSNGGIARVPGAPYYLWRADELVVYSLGGGAAEQPRTVLAGLDGDMIHCRSLYMDGTVYLLNADKETVLAFDVDDETIASIALPGERVAGGKPRSHLKSYLMEMSGRVCVATVDDGDRETNAVWLLITTERRWKRRCAFRNDWCWPATVAGVWDCGGALLIVIQADDESSIFMYDDATGEVSRLNPPPDASPEKSDYRICWGYKPTVVTPASIVGEFDQEKQRCRDIAADVLAAVTPLNEMHKRKGQEAALHTVCFMEFLVGVMRKLPGNLRRVIAGLDQFY

SEQ ID NO: 203909 - protein, 93 aa, Oryza sativa
  unsure (1)..(93): unsure at all Xaa locations
  Clone ID: PAT_MRT4530_99048C.1.pep
GFHLHIVDDLLSHHAGPAELAGATRTPPPSVCTGLTPGPAELQERCRIWAYAARSXXGSPRGPRRRTGRGDAASPRTKATGAGWRRQAAGHPR

SEQ ID NO: 203910 - protein, 222 aa, Oryza sativa
  unsure (1)..(222): unsure at all Xaa locations
  Clone ID: PAT_MRT4530_99049C.1.pep
VGDTVGRRKACHLPHAVQIFWQFAQLRVSHLLDYAPASPSPCDPAYAVFSRPSSPATALNAVPFLAVTPGXANILRLYACEDSSLCRVSCKDVATCGRAAASAKSECCYPLSDSSMWAFTEFECREFLSWVKNWSAAAGAALGVVRGVEVEWDVPKGSEMVTCADGAVLVNATAVRGGMWCAYDAGLIGDGFARGTVCSKGTXNSGQESDDRECFFTWKAEV

SEQ ID NO: 203911 - protein, 1779 aa, Oryza sativa
  Clone ID: PAT_MRT4530_9904C.1.pep
MSYYVDPRTSVPQYPLYPVYGYPLSTVARQVGGLGAQGSTTMSSNFVDNSANTNLNQGVPTSTMLVWTQVGEIVFPVYTTVPISAGLSMAGNENAVAATQDDSMSKDPPAEAEIGTSTTSEPEKDPSAAKPCLFDKNHEPTRMTSEVTRSWCPIHKTKKHTLQACWVFLNIHAEIRDCKERGIQRTSPTRDVYCPIHKTKNHDLSSCKAFLSAMKTSPPKVQQSHIPLRDEDKEQGATPISDRFVGVIDIDPHEPSVLHLLEDYGSSSTSTPCEVLAIDETGTSACANAEAENQVTTPTQHIRAVNAILRETPYDPVLNDDLARWTERLQESVTNLSNAFEEAAAAAHPEQPPTGDANGENPEQRESPHRATPPPRGTGDLRDHPNGRREARHTRDNENRSRHRVSSRRHDNEERGGRSSEDRDRDNRHNRHDHDDRERRVPGDTGLGRRHNDDDDGDRRRDNNGRRRQDSREPGRRPRNRMPEPSDPSSSSSSSSSSSSDRHPRRTYDRRQPTAPNARCRAFGRSLRDVRWPERFRPGAIEKYNGSTDPEEFLQVYSTQFVANFQGTYKRHAIEDDLHALTQNPDESLRDYVRRFNECRNTIPEITDAYVIRAFKSGVRDRYTTQALATRRITTTRRLFEIVDRCAHVDDALRHKNDNSKTGGEKKPVKDAPESSKKKNRKSGKRKAQADVLATEYADSPKRPDPQGSDMKKTWCPIHKSDIHSLEDCLVFKKSLAKHMALEKGKRVRVVEKDAEAATQESDSAYPNSDLHVSHIFGGSAAYSKREYKKVEREVCSTWQGAAPKMKWSEQKIEFSEEDHPKTAVIPGRYPIVVEPTFRNIKVARVLIDGGSSINLLFASTLDAMGIPQSELIPTDQPFYGITPQSSSKPLGKITLPVTFGQANNFRTEQITFDVAEFDTAYNAIIGRTALAKLMAASHYAYQVLKMLGPKGTITIQGNAKLVVQCDKRSVDMVEHTPSPPDTAEPPKKLSKTNKTPKPDGAIKIVPLSSANPDKTPSDMPGVPREVIEHKLMVRPDAKPVKQKLRRFAPDRKQAIREELDKLLKAGFIKEVLHPEWLANPVMVRKANGKWRMCVDFTDLNKACPKNHFPLPRIDQLVDSTAGCELLSFLNAYSGYHQISMAKEDEEKTTFITPFGVFCYVKMPFGLITAGNTFQRTVQGALSDQLGNNVEAYVDNIVVKTKTSDSLIDDLRETGIEANPEKIKAIENMKSPTRLKEVQKLTGCMAALSSTVIVVEREKVQRPVYYVSEALHDAKTRYPQIQKLLYAVIMTSRKLRHYFQAHRVTVVSSFPLGEVVRNIDVVGRIAKWVVELSQFDVRFVPRTTIKSQVLADFVADWTMPDNRSDNQIDNKTWTIAFDGALNSQGAGARFILTSPLGDQFKHAIHLNFRATNNTAEYEGLIAGISAAAALGVRLLIVKGDSELVANQVHKDYKCSSPELSKYLAEVRKLEKRFDGIEVQHVYRKDNIEPDDLARRASRREPLEPGTFLDVLTRPSVKEASGEGSPVALNISSGATEAERAVADIGTTDDWRTPLIKFIGSEELPEDDAEAEKIFRKAKVYCMIGNDLYKKAPNGRHLLLNIHEGICGSHAAGRTLVGKAFRQGFFWPTALKDAYDMVQQCEACQFHSKHTRLPAQALQTIPLTWPFSCWGLDILGPFPRGQGGYRFLFVAIDKFTKWIEATPMREIKADNAIKFIKGIFCRFGLPHRIITDNSSQFISADFQDYCIRLGVKICFASVSHPQSNGQVERANGIVHTDNVQ

SEQ ID NO: 203912 - protein, 201 aa, Oryza sativa
  unsure (1)..(201): unsure at all Xaa locations
  Clone ID: PAT_MRT4530_99050C.1.pep
GFHLGVSSKQSNRNGSHQMPLAHRRYLLYAHNHLHIVDDLLSHHAGPAELAGATRTPPPSVCTGLTPGPAELQERCRIWAYAARSDRPRAALVVEPGEETPLARGRRPLXAGWRRQAAGHPRSGEKEGGREEXDEEGDGKRXGAAAVASTTITGGLAGGGNTSEKRPGSPRAHRLAQLGRATWKSQEHHGDSEILTLPSII

SEQ ID NO: 203913 - protein, 89 aa, Oryza sativa
  unsure (1)..(89): unsure at all Xaa locations
  Clone ID: PAT_MRT4530_99051C.1.pep
LQPSLGCNPRRPXAKTCIQRRQDXFNRTTRFCRTWGWPNPAQFRLVASSIAPLHRLVNFGPIRCVNSEFLAHSYISLVLDIVRLIYRWC

SEQ ID NO: 203914 - protein, 118 aa, Oryza sativa
  Clone ID: PAT_MRT4530_99052C.1.pep
MNTNFIIYPNYIDYDASLSGKCNGVGIMIVYTIILCHDDDIIVVFGKLSVVFRLLDIIIWGYIMRICRGGLLMVTAQYEYSSTCIYNPKLLSCGGYSSVFSPGWMIMTGYRKKLGNQC

SEQ ID NO: 203915 - protein, 79 aa, Oryza sativa
  Clone ID: PAT_MRT4530_99053C.1.pep
HFSPPPLLLLVTFEATRGRERGEGRGRGSPLPPLLACRRSAIGAAGRSPEGAAGAESGSRFVASSNWLPLSATVSTICQ

SEQ ID NO: 203916 - protein, 414 aa, Oryza sativa
  unsure (1)..(414): unsure at all Xaa locations
  Clone ID: PAT_MRT4530_99054C.1.pep
TARHCSRAKPKPAAATTPVATTTSSPRPAPSRTPRPRSQGCPRTSRRRHLVNAAATRPPPRPPPAAPQHQGFAAPGTTAPATTSLPRTTRCRRRLRLPRSTSPPAASYTSAAAVASPPPPPPRLPRSTSPPPQTDQPPPAATDQPTPPPPTKQVGADGSNSPTPPPSPTKQVAAXPTDPAASRGATPGRRSKSPTPPTPSASASPSTRPASAGITTSAFAPLVFPVVAVTLICRRRAPPGRRLIDHGQRLRRPHLPSSRSTGPPPRAPWPASPSPSSTVVATLVRHGRRLHRLCSPWQWPLPTATASAADLVHGGGGRRRCGSRPARPPASATPWLPSSPARPPLCPRPRPSRCPRPHPLRRAILVLIHPVVLTHTRPTTLVRLCSGRHPRPPQSSSSLTSLGIQLEKLKLADD

SEQ ID NO: 203917 - protein, 75 aa, Oryza sativa
  Clone ID: PAT_MRT4530_99055C.1.pep
LEYSTWRCHSIIQANPTAACTKLLFASCSISILALCTAELHRLTRLQYCTRLFKMLQMQHQQNWYMKMIVQFLWA

SEQ ID NO: 203918 - protein, 129 aa, Oryza sativa
  Clone ID: PAT_MRT4530_99056C.1.pep
NSPKYFANHLPNGLLLLKQIFDNPSSSEPCKDNALAAICRIIYTINPPMPLQVFVDTLIPYLPFKGDEEEEPSALKALLFLASNNPQVLAAHRQAIIALLENDLSQPKKYNLEEPLIGQLGALLGQIKA

SEQ ID NO: 203919 - protein, 58 aa, Oryza sativa
  Clone ID: PAT_MRT4530_99057C.1.pep
VRGHSASSFQLQQFGDLSFDRNLAQAQALLAFNVPSRFGISPGYFGAPGPITTLAGVL

SEQ ID NO: 203920 - protein, 100 aa, Oryza sativa
  Clone ID: PAT_MRT4530_99058C.1.pep
IFSCVLSPFLLFMLNIDAFSRCSASIKYAGFQSRRGAHHDILSLSSTHADYQGFHQGGRPIHLVAHMDYPGIDLIFRFRKHWSILAGNEIYIGHICRVNN

SEQ ID NO: 203921 - protein, 122 aa, Oryza sativa
  Clone ID: PAT_MRT4530_99059C.1.pep
KPAYLILAEHREKASIFSMKRRNGIRRKLNIYHRYLANGAAPGEGGGEGGGEAPEGGCGEKRREGEGWRRSGARMRELPAVGPHLARAIGEGSERSASGPHMERAMWRKRAQDGEGRSRARR

SEQ ID NO: 203922 - protein, 744 aa, Oryza sativa
  Clone ID: PAT_MRT4530_9905C.1.pep
MEPRSPRPFPPSPAALSPSRRYIFAPRASLLRFRRSPLALAVGFVLAPSSSLSAVAANLRFAAVVTPDFLPTRRHLHRLRRVVVDPVRSSVSPADCRSTVALVIPNRAAASRRFGRRFRRPRRPGVSRGPPFAFPLLSALSGAAPPRRWSPAVTIGERVRRLPSAVPARPPSAASRGCQVGPGRQPPAPAGAADLWDPRRRPPPAACSRSTVDREADAWAPLPWTRLSVHGGPGARGWRRPAPWVPRVSRTRGRGRLTAGPHLAAAGRARRRPRRHGRREAARPRPDGHRRRPPARRSGARESGEEREAKGTVHGSPRDTRTAETTNGAEERGGAVRDDEGDGAPAVGGRSEGADGVGDNAAKPMEVTPRREEVRSDDGGEPEVGGDGGERDAVASEDPLFVEVEDAPRPYKDRSSGLCCKALPYFHMSSGANEGYTSCGPVVEMSWQRVGALLLGAQSCLPVPEVPAVGGIGSAPGGFEYLYVAIDKFTKWPEAYPVVKIDKHSALKFIKGITARFGVPNRIITDNGTQFTSELFGDHCEDMGIKLCFASPAHPRSNGQVERANAEILRGLKTKTFNILKKHGDSWIEELPAVLWANRTTPSRATGETPFFLVYGAEAVLPSELTLRSPRATMYCEADQDQLRRDDLDYLEERRRRAALRAARYQQSLRRYHQRRIRARSLCVNDLVLRRVQTRAGLSKLSPMWEGPYRVIGVPRPGSVRLAAGDGTELPNPWNIEHLRRFYP

SEQ ID NO: 203923 - protein, 61 aa, Oryza sativa
  unsure (1)..(61): unsure at all Xaa locations
  Clone ID: PAT_MRT4530_99060C.1.pep
MANAGWECXPKRWRERIGWGVEDRKIGWCAAVGCTGXRGSEGRGKSGHGDRAVNGMETGRP

SEQ ID NO: 203924 - protein, 68 aa, Oryza sativa
  Clone ID: PAT_MRT4530_99061C.1.pep
ITNCNKRNYTSLNHKLLKKRRGEPVHCRPPAATHHGWRAAALCAAPPPAARAAPPPAGHLPADAGRRM

SEQ ID NO: 203925 - protein, 65 aa, Oryza sativa
  Clone ID: PAT_MRT4530_99062C.1.pep
MQAVREEEQVVEEVAWHLAFAQVVVPYNWVVVHYTEGAEVIESVLEVVRQEAVYCHCLQGFQGCH

SEQ ID NO: 203926 - protein, 86 aa, Oryza sativa
  Clone ID: PAT_MRT4530_99063C.1.pep
LQNTNGLGVTILRRKLLRDLHLYPKAETLSQHNPIQQTVFLYHSEHMLANIPYIASTFSATEQKATLIPVHPSSRTMLQDCKRMNL

SEQ ID NO: 203927 - protein, 127 aa, Oryza sativa
  unsure (1)..(127): unsure at all Xaa locations
  Clone ID: PAT_MRT4530_99064C.1.pep
IFQEVYEADWKGRFFDAGIRYEHRLIDDMVAYALKSEGGYVWACKNYYGDVQSDFLAQGFGSLGLMTSVLVRPDGKTIEAEAAHGTATRHFRVHQKGGDTSTNXSLLWTFAWTRGLAHRAKLDDNAR

SEQ ID NO: 203928 - protein, 502 aa, Oryza sativa
  Clone ID: PAT_MRT4530_99065C.1.pep
MATTASSSSSLSFLSPQPIHPRRVRLPNPPPSTAAPPTPTAVRCTPAPAAAPSAASAASARSIPPPKLVRCPALDRQAARANRLRFARKLLVLLLSKPRRFLPLRVLRRCHRYLGLPPHRRRRPLVPFVLRYPALFRLFQAPTSHPLSPNLSTLAVALTPAAEALAADLAALRGSSELAPRLAAKMHRLLLLAPGRSLLVSKIAHLAPDLGLAMDFRATLCPQHPDLFTFVNTSHGHALQLVDPPPPPPPPLPPFRPAAPSDRLIDRPRRFPHLKLRRGLNLRRAHRDYLLRFHSLPEVSPFEPLDEGASLEMMERRACAVVREVLAMTVEKRTLVDHLTHFRRDFGLPNRLRAMLVRHPELFYVSVKGLRHSVFLVEAFDDDGRLLVEDDMLVARDRLEELVREGKRMRRAKKKGLLALADDSDEDDEEEDGEEQDSVQVDGESWDLLEDGGIGEDWEEVGDLGEGSDDDADAELDALEEFWVKKAVAEGLVDTGSELDAW

SEQ ID NO: 203929 - protein, 61 aa, Oryza sativa
  Clone ID: PAT_MRT4530_99066C.1.pep
EEEGKLSKARKARENVTAALAMGELALLDFWASPYRQRCLIALAEKKLPYDYSEQDLLIAK

SEQ ID NO: 203930 - protein, 154 aa, Oryza sativa
  Clone ID: PAT_MRT4530_99067C.1.pep
THAMRFVDQQVHSTPQTISLKLKFRSRSFADGAGSSYKSRITTAVGNDMNSEHDKGHMLHDEGSALNQHTNDGILTVSKSLPERTDKSTSLDDSKKWHLDPAKTYSAVYKRSKTNKHKKNLDSDAYGNGESTSVSNDDDGYQPTDYSPVKPDRA

SEQ ID NO: 203931 - protein, 77 aa, Oryza sativa
  unsure (1)..(77): unsure at all Xaa locations
  Clone ID: PAT_MRT4530_99068C.1.pep
IXTRFITEQNPIGNQPXEKKDMKKTKTSPGXHQHRRRTRSATRRIGEXGSAXSTXXLDPXQXAVGXDLXKGNHRRRR

SEQ ID NO: 203932 - protein, 225 aa, Oryza sativa
  unsure (1)..(225): unsure at all Xaa locations
  Clone ID: PAT_MRT4530_99069C.1.pep
MEVWPRAPDFRNQTCYFFCMFAYGMLLKFVSGLVYCMDYLEKNIDWLEEKLKPLIEDHYLLFDFPGQVELFFLHSNARSIIYKLIKKLNLRLTAVHLIDAHLCCDPGKYVSALLLSLSTMLHMELPHINVLSKIDLIENYGNLAFNLNFYTDVEDLSYLQRHLDQDPRSAKYRKLTKELCDVIDDFGLVNFTTLDIXDSSVVEFSKIAAAPLDWDYYRYPLLSLL

SEQ ID NO: 203933 - protein, 80 aa, Oryza sativa
  Clone ID: PAT_MRT4530_9906C.1.pep
MEAGTVRCAANYAPLTPLSFIQRAAAVYGDRAAVVCGERRHTWREARRRCVRVAAALAARFGVARGDVVAVLSPNVPAMY

SEQ ID NO: 203934 - protein, 339 aa, Oryza sativa
  unsure (1)..(339): unsure at all Xaa locations
  Clone ID: PAT_MRT4530_99070C.1.pep
MSWSLSLSMVEARLPPGFRFHPRDDELVVDYLSRRRRRRRRLPDXTLIDVDLNKCEPWDLPEIACIGGKEWYFYNLKDRKYARGQRTNRATESGYWKATGKDREITRKGSLVGMRKTLVFYRGRAPKGERTDWVMHEFRQELDHANHHHHLKYMQEGWVLCRVFYKSRTEAVAAPTMESTLPPRYINGGTSRSPLPPLVDSSISFNHGGYEEVLPCFSSSHHQQPSPASMNASAAKATLPRPLLGKERKQTQKGKYMGLSLAHVKFLHRPPERPNYYTWTLSLSFHSERNSSCSPPPPAKGIDRMGTSVQVTPLSGAYGEGPLCYLLADLVLGQRCWAC

SEQ ID NO: 203935 - protein, 304 aa, Oryza sativa
  Clone ID: PAT_MRT4530_99071C.1.pep
MVFGQVVIGPPGSGKTTYCNGMSQFLSLVGRKVAVINLDPANDALPYECAINIEDLIKLSDVMSEHSLGPNGGLVYCMDYLEKNIDWLEEKLKPLIEDHYLLFDFPGQVELFFLHSNARSIIYKLIKKLNLRLTAVHLIDAHLCCDPGKYVSALLLSLSTMLHMELPHINVLSKIDLIENYGNLAFNLNFYTDVEDLSYLQRHLDQDPRSAKYRKLTKELCDVIDDFGLVNFTTLDIQDKESVGNLVKLIDKSNGYIFSSIDSSVVEFSKIAAAPLDWDYYRTAEVQEKYMKDDEFVQKTSKTR

SEQ ID NO: 203936 - protein, 68 aa, Oryza sativa
  Clone ID: PAT_MRT4530_99072C.1.pep
GLSSVAFRGAAGIGHRCKHHAASRRCSLGGRGDNGCQGYSCVCDVVIEPAYSCYDDVSFIPVMGARPA

SEQ ID NO: 203937 - protein, 413 aa, Oryza sativa
  unsure (1)..(413): unsure at all Xaa locations
  Clone ID: PAT_MRT4530_99073C.1.pep
MSRVEDKVAALHAILKAKGLCYTCGERWSRDHKYGPTVQLHVVEELLEFRDSSSKERGDEEKDSAVIPNSEYEGEGLPPAGXFDHSIPLLPGAHPVNLRPYRYNPAQKNEIEXKHLNAITVKNRYPLPIIDELLDELAASCLFTSLDLQAGYHQIRMRLEDVHKTALKTHNGHYEFRVMSFGLTAAPATFQELMNTILSPLLRKGVLVFIDDILVYSTSLDQHVSLLRRAALWLWSPSPLSVITVGFTRRRSTSAAPLQPPKTVGEPSSPSSQAEPALEFVAGLRSSLFFTPTEKRREVRGGRWGVHASGYSYRGGDYDPGMVHCASIGLRYSSGVMSLSFVKHLTPLNLLMFVFLLLFHLKILFLWKFLNDAWSKEEIMRQNRREECHGSDYSYVYCGQSDNREPGEALSST

SEQ ID NO: 203938 - protein, 540 aa, Oryza sativa
  Clone ID: PAT_MRT4530_99074C.1.pep
MRGPPVSGSGEGGRGAGTRGPPVSDSRGRAEEVLEAIRRESRRPETSSSSRTTNFCSATVFPVGQPRTILAAGTRSDKRMSRVEDKVAALHAILKAKGLCYTCGERWSRDHKYGPTVQLHVVEELLEFRDSSSKERGDEEKDSAVIPNSEYEGEVCQISKEAMQGTETSEGLADKWTQQRHVLSPIKVKVADGGFTTSWIFDHSIPLLPGAHPVNLRPYRYNPAQKNEIEHQVSDMLQQGVIQPSSSPFSSPVLLVLKKDLTWRFCIDYRHLNAITVKNRYPLPIIDELLDELAASCLFTSLDLQAGYHQIRMRLEDVHKTALKTHNGHYEFRVMSFGLTAAPATFQELMNTILSPLLRKGVLVFIDDILVYSTSLDQHVSLLRRAALWLWSPSPLSVITVGFTRRRSTSAAPLQPPKTVGEPSSPSSQAEPPLEFVAGLRSSLFFTPTEKRREVRGGRWGVHASGYSYRGGDYDPGMVHCASIGLRYSSGVMSLSFVKHLTPLNLLMFVFLLLFHLKILFLWKFLNDAWSKEEIMRQNR

SEQ ID NO: 203939 - protein, 128 aa, Oryza sativa
  Clone ID: PAT_MRT4530_99075C.1.pep
KAFKKIWGEKIFPVPGVGKKNTPPPRGALLPKEGGGNLFFLPGALKKYRGGGAPPPFWPAFFLRGFYKSLLKNGFKKKDPNTPRGPKKNFGQKRSTQIFWVGGINRGLNGPHNLFFNDGGGTKKKKSL

SEQ ID NO: 203940 - protein, 120 aa, Oryza sativa
  Clone ID: PAT_MRT4530_99076C.1.pep
MELHGRWTAARRAATAAHPFPLSLSFDSLSFPAVRRRWLRWRRRCGGPGREGDGVGGGPNGQGHNEGEGGWWARRGGQAVGATGRAAGLKVSSASITHRLGVLRLQHRPPGHVPPQSPAA

SEQ ID NO: 203941 - protein, 146 aa, Oryza sativa
  Clone ID: PAT_MRT4530_99077C.1.pep
MAKMCVGASGPPCHRAAAPPPSPPILLVIEPTPSLFLLSSYHIRGCRHPSAAAASIRHRRQSSSSLSRRHPPTLHGAAASPLPSCHRLFHHRQRSSLSATQCCLFAIAPTLREAAEGPPQLLPCGRHRSSCPSRFGQREERERDKE

SEQ ID NO: 203942 - protein, 242 aa, Oryza sativa
  unsure (1)..(242): unsure at all Xaa locations
  Clone ID: PAT_MRT4530_99078C.1.pep
TCFLLYFPNTYLKGKPLSDMSSNTSICQFXADLXKVNNHFLRYGSFKCANGTKIRFWKDMXIENALKDQYPTLYNVARKKXSTVAEVLSTTLLNVSFRRATAYQKLIGWNDLILMLANITLSNEKNYFVWLLHXNSQFPVNSKYTVSMKSNIMIHKRNLWDLKVLXIKVFLWFLHMKVILTXDNLTNGKXGRQTCFWDTICTIVLYFWNLYPRMSYSMGGVVPLQLLAKKSILRLFQQKKVS

SEQ ID NO: 203943 - protein, 167 aa, Oryza sativa
  Clone ID: PAT_MRT4530_99079C.1.pep
LTPPQDVDAGLEDNKASRNASSRSAAMVTSGMEVAAPVANAGGGEASAMPTTVAAMVTDRSTMGARHKQGKKRNSRLRLVHFEGEKDWRRRENKGGMATSSCVAVSEPHGTTAIGDRRVVGARRHEAAQGGHELGSGWHKEQRRQVQGGTQLARADTSRTQGGTSGG

SEQ ID NO: 203944 - protein, 384 aa, Oryza sativa
  unsure (1)..(384): unsure at all Xaa locations
  Clone ID: PAT_MRT4530_9907C.1.pep
MNRVPTSWGFIFXRVNKAEERGARTGSMGVGPTRQPHGPRWTGCTRLTPAGAVGPTRQPHPRARAADSRAPHGSRGARPKAASPAQPTGGGAPAPRWSPPATTGAAERRPREGREGGSETAVHGSPRVDGDDGNGYRSGGRRRRGSGRRGRRRSGGRRAKRRGGRGRRGRGEAEGGDAEARGGPGXRRRRTGARRRRRRERATSRAQIRRGGRAARGGTGRRRCGEGLNRAGAREAGRGREETSAGXSAAINGAGEIXGSGFQPNPRERGREKWGERERESRGVISPSLLRAGTAGGGGIRGGGGARARARRRERREDRDDRWAPPVSEGGGRARPSAARARGXEADWAAGERREREGGGPSRPKRGKGEKRXLFRAFLFIKPF

SEQ ID NO: 203945 - protein, 39 aa, Oryza sativa
  Clone ID: PAT_MRT4530_99080C.1.pep
MEELGNITKLEKQRHHVIGQYVVGQKWTEFGARIWELEL

SEQ ID NO: 203946 - protein, 72 aa, Oryza sativa
  Clone ID: PAT_MRT4530_99081C.1.pep
MQVKQAPRERQSLSPLSPAGQTTIGRPVRPASARLDRHQLGLTGCGPGGSGSPSQSTAASHQAAGQTEVITP

SEQ ID NO: 203947 - protein, 159 aa, Oryza sativa
  Clone ID: PAT_MRT4530_99082C.1.pep
MVTSGMEVAAPVANAGGVGHADHGGSHGDGQEHDGSSTQARKEGWGKFSPVRGDPAGAMVRRQKRNSRLRLVHFEGEKDWRRRENKGGMATSSCVAVSEPHGTTAIGDRRVVGARRHEAAQGGHELGSGWHKEQRRQVQGGTQLARADTSRTQGGTSGG

SEQ ID NO: 203948 - protein, 232 aa, Oryza sativa
  unsure (1)..(232): unsure at all Xaa locations
  Clone ID: PAT_MRT4530_99083C.1.pep
MDLTPAGGERDIPDDLFMCSELYIAAFEGHTDQVIGLLEGSRASAAVAGNGWSSPAAQPTAKHHGNCNIHEVTAERWTLLHIAAAQGHDDLIDELCRRDSGLLSAASSSGDTPLHCAARAGHAGAVRAIDRLARANVEEDRLREALRGRNEAGDTALHLAARHGHGEAAEAVVEXAPETAADLNGAGVSPLYLAVMSGSVRAVTAILWCRDASATGPKSQNALHAAVLQCSG

SEQ ID NO: 203949 - protein, 407 aa, Oryza sativa
  Clone ID: PAT_MRT4530_99084C.1.pep
MTGAAAAVSPLVAWPRSAPASRGGRRAARASAFHPDVSRAVESLQAEFREVDRALALNSARVSAAFHAAHVAPHHFGGSTGYGHDDGGGREVLDSVFAQIVGAEAAIVRPQFFSGTHAIACALFALLRPGHELLAVAGPPYDTLEEVIGIRGSANVGSLKDFGVAYREVPMQNPNCMVMVDNCYGEFVETSEPPMVGADLIAGSLIKNPGGTIAPCGGYVAGKKDLVAAAAARLSAPGLGVEFGSTPGHVMRALFQGLFLAPQMVGEAVKGGMLIAEVMSTKGYRVQPLPRVPRHDIVQAVELGNRERLIAFCEIVQQTCPVGSFIKPTAGETPGYASEVIFADGTFIDGSTSELSCDGPLRDPYAVFCQVKFIILLGIDVVSSESCQLIIGITDLMQETNMAHVFG

SEQ ID NO: 203950 - protein, 275 aa, Oryza sativa
  Clone ID: PAT_MRT4530_99085C.1.pep
MAPSFRLSSAPESADEATAHNKEIYDQLRRVAETFPSAPSLIGLPCSRHPDGWYTFTNGVVSSMVIKEHLTARATDIFLTTFPKSSTTWLKALLYSTLHRGTDELVAHSPHQLVPFLESQVFANDRIPDLSSLPSPRLFMTHIPSQSLPDSVAASGCNVFGPFWEHILGYWRWHVEKPNQVLFLTYEELVANTLGQLRRLAEFVGCPFTTEEQKHGTTHTSWLPPQLPKRPTERLTWKSMTNSGKSWRPSRRQSAASANHTVATLTDGTCPGGGL

SEQ ID NO: 203951 - protein, 109 aa, Oryza sativa
  unsure (1)..(109): unsure at all Xaa locations
  Clone ID: PAT_MRT4530_99086C.1.pep
MPWDIDEAHRQFCDGXSQFGPFWEHILGYWRWHVEKPNQVLFLTYDELVANTLGQLRRLAEFVGCPFTTEEQKHGTVPNNTVFRRGVVGDWRNHLTPEMARRIDEITKS

SEQ ID NO: 203952 - protein, 144 aa, Oryza sativa
  Clone ID: PAT_MRT4530_99087C.1.pep
KRKRKGIPETRREVRRTCLIADRPAGGGGHGCRPRWRPCRRAATAREGTQGRWCGGGAPGNGGPAGEAEARGSAQGRQRWRGLALVHRLVTDGDPHSTPWWTQLCSDVAVVLAILLDRFFDMEHRQANRRRRPRAVGGLCRRQA

SEQ ID NO: 203953 - protein, 346 aa, Oryza sativa
  Clone ID: PAT_MRT4530_99088C.1.pep
MAPSFRLSSAPESADEATAHKEIYDQLRRVAETFPSAPSLIGLPCSRHPDGWYTFTNGVVSSMVIKEHLTARATDIFLTTFPKSGTTWLKVLLYSTLHRGTDELVAHSPHQLVPFLESQVFVNDRIPDLSSLSSPRLFMTHIPSQSLPNSVATSGCKVVYLCRDPKDCFVSLWHFWNRFMPWDIDEAHRQFCDGVSQFGPFWEHIPGYWRWHHVLGYWRWHVETPSQVFFLTYEELAADTLGLLRRLAEFVGHPFTVEEQEAGVDRKIVEICAMESSSRLDVNLSGTTDFIEKDVPNNIFFRRGVVGDWRNYLTPEMAMKIDEIIEIKFEGTGLLFHPQLLRQKGE

SEQ ID NO: 203954 - protein, 756 aa, Oryza sativa
  Clone ID: PAT_MRT4530_99089C.1.pep
MPGWIITFLLILQFISSLRGLVIFSFVAHFFLVFFAGLRRHQPTGVRMFILWGANQFARWAPVTVLGTLSVGSTPQKEQLVTLWVAFMLLHAGMPDNFTAYSLEDTVLSRRQQAGVWYQLLGSASPFPFLLKNISFIISNGGDAMLGVSSLVLLMAIGKYWEGAFQALMQGNLKSMQSSRKKMKMKNNSTKSVRNSLQIARRGGREPNDEQILLAAHDMLDITKDAFIDFLDQNNADEQEALSATWDEKLYRVVNMELSLMYDLIYTKAAVVHSWKGYILRFASPIAATAAFVLFWLHSKEGQATADVVITYVLLAGMVVLDIKWLLRAVASTWFYSFLDERPRSWLHHALLCSGKWRLIRRLIVSDLNLFRILDNNKKPTRYRMWSQTIGQYNLLHECTRYESEARTKNWKSGMFKRLAPEENWMEYEYQRMRGNHIDSRDFRDELFNSIWQVLKKPFPQRRPPRQIIVTEAWRPAPAAPPFTHAHQEADLALKFTPDLQETILILHIATDIFLFSAESEIEASPKSKKDVEVIKALSDYMMFLVAVRPGMLPGLVLSSRYEAVSEALAGIWKEKEGSDPSLRTSSMMREKRLAEILIANEDEEGNYFQVDDSRPQSGFLSVLYDTSNVLSEGAILAMFLLPRIRGPNFRKNIIEKVGEHGDGEPPILKKFHRQFPDLMEFAKNVSFPSIAMTTDAIIGEWARQLINVSIRCTRDSHAKQLARGGELTTVVWILAEHARILRIKTEKKPASYDAV

SEQ ID NO: 203955 - protein, 32 aa, Oryza sativa
  Clone ID: PAT_MRT4530_9908C.1.pep
LKSTSQAIRYCAQSRSQLTTKVENVTAHSILV

SEQ ID NO: 203956 - protein, 55 aa, Oryza sativa
  Clone ID: PAT_MRT4530_99090C.1.pep
HNRLLLTLSHRCKQQTAPRRSLVARMTRASTTAISMTMIWTVERCCRSTTSMLWK

SEQ ID NO: 203957 - protein, 186 aa, Oryza sativa
  unsure (1)..(186): unsure at all Xaa locations
  Clone ID: PAT_MRT4530_99091C.1.pep
WACTVTEALADRIXPKKWQEALXVFQMLKEQPFYHPKEGTFMKLLLLLGRSGQPSRARYLFDEMLQQGCQPTPELYTALIAAYCRNGLLDDAFRLLADMKASPVCQPDVYTYSTIIKACVDASRFDIVDAMYKDMADRSIAPNTVTQNIVLSGYGRAGRLDDMEKVLSAMLDSTTSKPDVWTMNII

SEQ ID NO: 203958 - protein, 157 aa, Oryza sativa
  Clone ID: PAT_MRT4530_99092C.1.pep
MASDYQQTSVGKNKQSLIDCMLVKAFGKPYVSNTHMSAILCNKICYMLAFADISVAGYLVTWNFRNNYLTGPIPPFIGKFTSMQYLSLSLNPLSGLLPKELGNLTNLVSLGIGSNNFTGGLPEELGNLTKLQRLKASDNGFNGKIPEYLGTITNLVE

SEQ ID NO: 203959 - protein, 85 aa, Oryza sativa
  Clone ID: PAT_MRT4530_99093C.1.pep
MAEAVAAWSCARKRGLLCATRPSQVVAIACASGIARRDQPETVGGRRCAISPGGSQAGVDASGAARQGQDAPCDRVKVGAMPRQG

SEQ ID NO: 203960 - protein, 122 aa, Oryza sativa
  Clone ID: PAT_MRT4530_99094C.1.pep
MAMPSSSRICAGRAAPRSMPAAEEGGRTVRHTGSSARCGLSLDRATALPPPAPMRRDGGVELGAAATPPALGRRRRRLQPRRGEVEAWSSVSPPLCFVRPGERVVRNVTNGECPKRFGDTPV

SEQ ID NO: 203961 - protein, 38 aa, Oryza sativa
  Clone ID: PAT_MRT4530_99095C.1.pep
DDDHRHHLPRVVARAVLASSLWDTDSAIVLQHRLGSAR

SEQ ID NO: 203962 - protein, 428 aa, Oryza sativa
  Clone ID: PAT_MRT4530_99096C.1.pep
MAAAAAAGATPATARKALLTTTATLLSSSLARSRRSLSCSAAAASAAPRIAPQPPDLLRWVQREGGFVHPALRVVDHPEHGLGVSAAAAEGDIPPGDVLIALPGRLPLRLRRPAGAADAVLVQLADQVNKRCRFLLEFEKEVKHKLGTVPLEDHPFCGQDVNSSSLGWAMSAASTRAFRLHGEIPMLLPLIDMCNHSFNPNARIVQEGNVDSPDMSVKVVAETKIDQNAAVTLNYGCYPNDFFLLDYGFVITSNSYDQVELSYDGTLLDAASMAAGVSSPNFSAPAKWQQDILSQLNLYGEGAILKVSIGGPEIVDGRLLAALRVIIAADPDAVSGHDLKTLMSLKEKAPLGPAVEASALRTVLALCTFALQHFHTKIMEDEAILKGEPPLTTELAVQFRLQKKLLLLDVIQNLSRRIKMLALDKSTV

SEQ ID NO: 203963 - protein, 240 aa, Oryza sativa
  unsure (1)..(240): unsure at all Xaa locations
  Clone ID: PAT_MRT4530_99097C.1.pep
MACHQRSSSLPSGPHSTVAKVEEELQGLKAHISSPSVTVAAICDGLRKLGDVYNSIEGIMCLPSNQVGLSLPQQKQMVEEELDRSLVLIDLCNSMQENLSELKMSILELQLVLKRGDHAAIQLKFESFVRIARKAQKPFKKTGSKATAECCNLVXIMAEAREMAVSLLDTTSGLLVKKIGAPSSSKWSLVSKRFQKKNVVCDEEQLQALEREIGDLENGAEFLFRRLIQTRVSLLNILSS

SEQ ID NO: 203964 - protein, 81 aa, Oryza sativa
  Clone ID: PAT_MRT4530_99098C.1.pep
MAADALSGGDRGGSGDGKGARGYGGGDARVAALRRRRLLLWVEDSNCERCALADSTHETYSPPSDRAISRDFADVALTWQC

SEQ ID NO: 203965 - protein, 210 aa, Oryza sativa
  Clone ID: PAT_MRT4530_99099C.1.pep
MSAGLVTEEVMVGRLVRIRRTVMQMLRDRGYLVVEHELAMGRRDFLRKYGESFHREDLLINKYKKNDPSDQIYVFFPNDDKVGMKHIKKYVEMMKAENVSRAVLVLQQNLTPFARSFLQELEPKIHLEIFQEAELLINIKEHVLVPEHQVLNNEEKKTLLERYTLKETQLPRIQITDPIARYYGLRRGQVVKIIRPSETAGRYVTYRYVV

SEQ ID NO: 203966 - protein, 250 aa, Oryza sativa
  unsure (1)..(250): unsure at all Xaa locations
  Clone ID: PAT_MRT4530_9909C.1.pep
GRVGGRVGGRVGGRVGCAIQEYCLQCKDIEHCRAEIRDFDAFDLRLRLPAVISKLHKLVNHNGGVTYIHCTAGLGRAPAVTLAYMFWILGYSLNEGHQLLQSKPACFPKLEAIKLATADILTGLSKNSITLKWESDSCSSVEISGLDVGWXQIIPLTYNKEKRAWYLERELPEGRYEYKYIVDGKWVCNDNEKKTKANADGHVNNYVQVSRDGTSDEERELRERLTGQNPDLTKEERLMIREYLEQYVER

SEQ ID NO: 203967 - protein, 39 aa, Oryza sativa
  Clone ID: PAT_MRT4530_990C.1.pep
CAAERRADDCPLVSGSPRRASPLHRLQGDLLGRSYQVEL

SEQ ID NO: 203968 - protein, 63 aa, Oryza sativa
  Clone ID: PAT_MRT4530_99100C.1.pep
LYIKLYQTNLRRFQTKTGNIWLGLTRQHYATKYKGSHYRNDQVLDMFSLIGVDNPDKQQEYMI

SEQ ID NO: 203969 - protein, 235 aa, Oryza sativa
  Clone ID: PAT_MRT4530_99101C.1.pep
MLGFRSQTPWSGAGAEPICGDAAAAVVAARKGMETPLTAVAEAFEELARRMEADGGELRLGPFGDTCALVSVLFSCLGMAFRFAEIEYVAKVNDLIGAAKSYGTLNDILDKDVENDCVKKQGSHSRNLRRVRLGLGLIKVLFEQFLSTQECSLYDAATTAYGQVCAPFHSWAVRKAVGAGMYTLPSREQLIVRLNETDCSVQKEMRRYIDASSPIIDYIDNLFLSRSISLDWWRR

SEQ ID NO: 203970 - protein, 176 aa, Oryza sativa
  Clone ID: PAT_MRT4530_99102C.1.pep
MATMGSAPSYVVLDRVVHLDKEAVKEESEWAIMECRDRKTYLRNDHVGDEVVYGLSLLVQIAEPPDLSKLSIRLSEPPVQVAARPEEILDDGSSVLQLLDLPKRALNLHTSVQSVADDLIVFTSCLRNRTHRYLVYDAIGKSLSMIPCLPNRWRSLWHVPASPSSCRRRRRLHHCP

SEQ ID NO: 203971 - protein, 75 aa, Oryza sativa
  Clone ID: PAT_MRT4530_99103C.1.pep
GTIHNLSREQHPEEGDRKEGYLLSLLGWWVPRKQSPMEGLSIQHALPGGRLPSPERASLEKLRPPKPCSPLPPRP

SEQ ID NO: 203972 - protein, 128 aa, Oryza sativa
  Clone ID: PAT_MRT4530_99104C.1.pep
MGEVALDLAAPDSSPAVWKRGESRKYGGSTEVGNMTSRRGGRARKWNIRGSMEQVALDLADPRSSASEPVDPLLRRGVQGEEEREDLDAPTRRKGKGMRERCYSGRRIRLERRPSKIKMGKLHSRARH

SEQ ID NO: 203973 - protein, 73 aa, Oryza sativa
  unsure (1)..(73): unsure at all Xaa locations
  Clone ID: PAT_MRT4530_99105C.1.pep
APSPPICRRPPPTVQNRPSGGRQGGRLQKSMPPLXAAHLQAGLPHSIKSALAEGRKGGRLQISLTAVPPERTG

SEQ ID NO: 203974 - protein, 57 aa, Oryza sativa
  Clone ID: PAT_MRT4530_99106C.1.pep
NKETGAGGAGAPPRVDGLSRPSLFPDLVKGRDRHGAVPANSIRLLRETRSEFGTSSC

SEQ ID NO: 203975 - protein, 103 aa, Oryza sativa
  unsure (1)..(103): unsure at all Xaa locations
  Clone ID: PAT_MRT4530_99107C.1.pep
RGNLICNVLDSGAHHGHLRQKNFPREHRGHPHHKQQPPGVESPRGVGPYLVHXHQQYLHPPKGGKNRNPLPXKSLSNINHCGCQQGNLKQTRKAGGELNRSPF

SEQ ID NO: 203976 - protein, 1057 aa, Oryza sativa
  Clone ID: PAT_MRT4530_99108C.1.pep
MSSSASEQPRGDQVWSSSSPPRSSTPPPQPLVGGLIESLSFRSCGFGRAAVSAFEKEDLRARAALPQRLRAAVHAALRAKDPSAGAFAYVAGNAAARGGRGGGGSGGGREVSAANPWFEVAHDDAPESPLVAFVNPRSGGRLGPVLKTRLQELIGEDQAALVTSGWLRRSADLHNALIRALAGSARPHLALPLYAHLLRAGHHPTPHTLPSLLKSLALSPAVPGARGLALAVHAHAVKLGLAGFLLVSNALIRVHAGILGRLSDALVLLRTAASVDASTFNTLITAYARAGRVTDARALFDEMPARNAVSWSAMVNGYVQAGDGREALGLFARMQADGVRPDDTVLVGVLAACAQLGVLEQGKWVHGYLKANNIRITVFLGTALVDMYAKCGEMQLAMEVFKVMKEKNVLAWTTMIKGLAMHGRGSEALELFSQMERLGVKPDDIAFIGALCACTHTGLVDKGRELFDSMVRKYGIKPKIEHYGCMVDLLARNGLLNEAREMVEKMPMKPDALIWGALMAGCRFHKNVELAEYVVKHWIELEPDKSGAYVLLGNIYAASGRHASAREIRHLMREKGVDKTPGCSTVEIKGVIHQFIVGDLSHPFIEKILSKWDEIDSRIRLEEGYVPDKKEVLLDIEEEEKENALSRHSEKMAIAFALINTSDDMPIRIVKNLRVCHDCHHVTKLISKVFDLTVVKPSDFVQYVLGCLEQLADAGDHSAKSIRHNLRVMVAGGDGTVGWVLGCLGDLYVQNREPIPPVAVIPLGTGNDLSRSFGWGASFPFGWKAAAKRSLYKAIFGSVSCLDSLMMIHQYFCYVKKPYLSWLSPHSWHIVVSMPERGDEEEELDFPHSLRNLGECTFYDDGTAEGELPETVSCFDGVFYNYFSIGMDAQVAYGFHHLRDEKPFLASGPLSNKLIYAGYTCKQGWFFTQCVSDPELRAIVALNLHNYASGRNPWGNLKPEYLEKRGFVEAQSDDGLLEIFGLKQGWHASLVMVELISAKHIAQAAAIRLEIKGGQWRDAYMQMDGEPWKQPLDHEYSTFVDIKKVPYPSLIINGGDR

SEQ ID NO: 203977 - protein, 223 aa, Oryza sativa
  unsure (1)..(223): unsure at all Xaa locations
  Clone ID: PAT_MRT4530_99109C.1.pep
PRVREELDFPHSLRNLGECTFYDDGTAEGELPETVSCFDGVFYNYFSIGMDAQVAYGFHHLRDEKPFLASGPLSNKLIYAGYTCKQGWFFTQCVSDPELRGLTNIIRLSIKKLDSSEWENIPVPSSVRAIVALNLHNYASGRNPWGNLKPEYLEKRGFVEAQSDDGLLEIFGLKQGWHASLVMVELISAXHIAXAAAIRLEIXGGQWRDAYMQMDGEPWKQPL

SEQ ID NO: 203978 - protein, 281 aa, Oryza sativa
  Clone ID: PAT_MRT4530_9910C.1.pep
MVRGGSRRSNTVKTASGASTSSAESGAVEAGTEKSDTYSTNMTQAMGAVNSCIPSLTSSDILELTSVPFKNIVYNLAYMFWILGYSLNEGHQLLQSKRACFPKLEAIKLATADILTGLSKNSITLKWESDSCSSVEISGLDVGWGQIIPLTYNKEKRAWYLERELPLLICHICYTVGLDFTVANFTLTFPYTFALCFPKEGRYEYKYIVDGKWVCNDNEKKTKANADGHVNNYVQVSRDGTSDEERELRERLTGQNPDLTKEERLMIREYLEQGFADYAYA

SEQ ID NO: 203979 - protein, 185 aa, Oryza sativa
  Clone ID: PAT_MRT4530_99110C.1.pep
SPLPLQLFTEKERSSQTDYCVTRGMQSCVCMSACVCGLTSRIITCTCTTKTNQNLSKNPQRNTVFHPAVLFSQFGVMALAATKILASSPPCCWQNCGGIIGRELRRGELSSAAVSYPHLQLSAKPRPLRAAAMPPWGPCPLVWAHLWGEDPDRVDRGRREEAGPVTFLGPRLRNAPGVLRHGGPA

SEQ ID NO: 203980 - protein, 98 aa, Oryza sativa
  Clone ID: PAT_MRT4530_99111C.1.pep
CFPTSDAQNHHVHHGCYRFHSGIIISQSSASASLQHHQHSIQSSPSNSISFFFTLIKTHNQFSALACHLYIFALGSNKSLSSSRDCGSSSQTLRSLSH

SEQ ID NO: 203981 - protein, 61 aa, Oryza sativa
  Clone ID: PAT_MRT4530_99112C.1.pep
MARMDDGVSNPLRVSICALYIELGPPVPRCMGLGHLAHPMSCGPKAERGFFVNRVMKEALR

SEQ ID NO: 203982 - protein, 86 aa, Oryza sativa
  unsure (1)..(86): unsure at all Xaa locations
  Clone ID: PAT_MRT4530_99113C.1.pep
LGRCPKEKFGFXGPWPKNPLPFDNFFFPELFSGAKEGLFXLLSDKALLSGPAFRPLVEKFSANXEGFFXDSKGAPPKLSEMGFADA

SEQ ID NO: 203983 - protein, 146 aa, Oryza sativa
  unsure (1)..(146): unsure at all Xaa locations
  Clone ID: PAT_MRT4530_99114C.1.pep
NSARARNSADDYPAHYLATFISRVNNILWQLRSSSLENFIVKFPLLGRDAHHIDRWVSFSAASRARQIVLYLCPEEEDTDMNDMYSFPLHIFSGDNCVXSLSLGFVSLTLPPHLSGFTNLKXLGLHMVSIRGDLQCLLSSVMLWSG

SEQ ID NO: 203984 - protein, 109 aa, Oryza sativa
  Clone ID: PAT_MRT4530_99115C.1.pep
CTAPDLIGCDRPHAVLFPILSDHTRHITSDGLMLGAGPITIATTVTMDDSSLTKTTAIFMDLPTMPPSKYSAKTTKGTDKPDATRTARFAILTRSKRANTDTRTCALAT

SEQ ID NO: 203985 - protein, 112 aa, Oryza sativa
  Clone ID: PAT_MRT4530_99116C.1.pep
MEAERHRGLVNLPSSLLELLADAHSHLAFLFLNGATSGTVVAMATAKEAREGNFHWRSPTRELEEGGGMAGRKKGEGGATIRGDREECHVGRGSSQTSHVDVTSAEITIQTI

SEQ ID NO: 203986 - protein, 669 aa, Oryza sativa
  Clone ID: PAT_MRT4530_99117C.1.pep
MHGSNRRKLVMEVRVEDVNYNIMADDYSKFIEDLRKKLANHPHKEMIHDVPVLARQQSPRQPARWMYINLVGRKKDRATVAVRDDNVYLMGFRNMNGEWFHLGFSKWSVPILPESSKFLECDVAYRNLLDVPQGEQVMSRLVEVELRKTVVLDAVHRLSRYTQRGQDDRIDRFTKRDLARLIIVICESARMRPHYTTVNKGFVHDETTSLTKLHVFYLWNWGLMSRALRQGWRPWPIRLVEDARAVVQLLLNAAAAMPLRMTETEAASSSFANDMPFASSAFLDVMHFASSPDEMAFASLPFLDWMDFDYSNTKAKATEANEQPAAIDDMAPVNDEEPAVTTDDLAWEYHEESAASDDIDDLASEDHEESAASDDFAPVVDEEPAATDYEDEFTGQVHGRRLVELLAVSSDFDSFMISIFDGKRGQIVYNHHQGHHTVIHDSQRNLVLTGPYRAISADGSFLIEVDTNNEDVHPDKKRKNNESEVSSDDVDGTLFWDSYNDYNYTRSDRILAHTIRTSLGPVEVTYAVLTNAVEATVQVKLLLLTGDGAATFAGSDTLFVYGDITVRSHCFDVASMLFSHGSQNKVAVALTSDTATIPLSRCVVAVPLHHRVEIEAKLYVETSNEEESINYTCFQGKLDFAAGRDQQIQQISHGDNPAVVEVTWSPDFF

SEQ ID NO: 203987 - protein, 120 aa, Oryza sativa
  Clone ID: PAT_MRT4530_99118C.1.pep
MVAPPSPFFLPAIPPPSSSSLVGELPPPSTIAAEHGGRAPPHQQHGGLPPVEIPLPRFFCCGHRHHRATRCAVEEEEGKVAMGISEKLKEGGGKVDEPPMPLGLHVSATSLPHRTKIKSN

SEQ ID NO: 203988 - protein, 581 aa, Oryza sativa
  Clone ID: PAT_MRT4530_99119C.1.pep
MAAASPPASPPHPKRRKMSSSSDPDQEPTSPSAAGADGAQPRAPRYKRRKVAILLGYCGAGYQGMQKNPGARTIEGDLEEALYRAGAVPEADRAAPRRYDWARAARTDKGVSAAAQVVSGRFYVDPPVFTDRLNAQLAPQIRAFGYVRVTNSFNAKKFCDRRRYVYLLPVFALDPSAHPDREAVMASVGSGSELTKCLECSERGRKVPGVMGREGKVPDPALQEEKSVEASREEAAVGSNEDANCDPASTGDRSVDLPIPDNETNTQITEMRSNGAEKCDVQLSGGTLCSEAVPASNSETVCPILNSDSNTNSDSVDVDPSFVAEKKGSIETVVTEDGKKQAMDVVTEDEKKQDVDYEGSSLEEMPLRSAFSYTHEVKERFNRILKKYVGTHNFHNFTTRTKAEDPAAKRFIISFAADRVVNLDGIDFIRCEVVGQSFMLHQIRKMIGLAVAVMRNCAPESIYDVAFRKDVNLNVPTAPEVGLYLDECMFTSYNKKWKDSHEAVSMEPYSEEAEEFKLKYIFPHIAAMEHKEGAVALWLHSLNSRNYPDFRYMDNAGTEASIAAAVESVDEGTVPSDNISE

SEQ ID NO: 203989 - protein, 156 aa, Oryza sativa
  unsure (1)..(156): unsure at all Xaa locations
  Clone ID: PAT_MRT4530_9911C.1.pep
HEAYFQLLGPSTSRLPSRGLDECLQRDDIAPCRAEIRDFDAFDLRLRLPAVISKLHKLVNHNGGVTYIHCTAGLGRAPAVTLAYMFWILGYXLMKGHQLQQSKRGCCPKLEAIKLATADILTGLSKNSITSDLEGLYQRCSERIKGAFYWVKTRYS

SEQ ID NO: 203990 - protein, 74 aa, Oryza sativa
  Clone ID: PAT_MRT4530_99120C.1.pep
MAAGRCSRGEARHVKGWGEDQGLNSDYGSYRAPDVKDEKNPAAGPGRMSLSLPTCPSEIMDPHLEVFSPNLLPT

SEQ ID NO: 203991 - protein, 111 aa, Oryza sativa
  Clone ID: PAT_MRT4530_99121C.1.pep
MRQRLEAACAANLATLLARPAHGLGEIWFGQREREEGRPAGRGKLDFAIERNGVTTPLATEHASTRLFDRHTDNRTLLAAFATCHHYATASLTIATSTPNRMPPPVSHVYI

SEQ ID NO: 203992 - protein, 643 aa, Oryza sativa
  Clone ID: PAT_MRT4530_99122C.1.pep
MAQEGNEDTDDDFDINDGESNEDTNDDVDIDDESNEDTDVDINVRVENGAPETRGKTKLKDVWNLSTKLKDVWNLPKGLRIVVQCNDLNQAVGEEAGILGKFLGMVARNGSLCSLGYTDWRYVIGKREKNTNELKVKKDILKQMRFLYAPRMEEFILKKIVERWWQYKAKLKDLYFDVNETKEANCNNVLEGVLSDQWIALVNHWMNEKSKRQKDPAKKKPHRAVVYVHTHKRKSDKNINGHVDNLKRLIAEQLALADASKGKTAWKGDALNQILGDDKPGRVHGLGLVPKPKQVLDVPTSRRLQNINLTTVEDNSSEDVMAIRLQMEKLERHVENNDAELLQLKEKATKLEKAQKNQRVYGDNPSQEICMFEEGNIMDQQDNSLMNTQSHVHDENLQPPTKHSTVYKNTQSLGQNHSGKQRKITSCANKRKGNLDQNELMQPGKSISSAYKNKENLTRKLVRPSLNKYSTASKKRQCNTMDFLTDNSTVKVYGDGPLQEICHVEQENIVMNSQSHVQDEDKTPPTKHATAHKNKRTFGLNDHGKQMEIICAKKQQCNKMDFITDNSMEVGTKVFLKSWKNRNTNVALATIVSCDPTHRVGGVELGNEFLMVHVDLALAKSEDLIRPYKGYKIVGHVVGLEIA

SEQ ID NO: 203993 - protein, 741 aa, Oryza sativa
  Clone ID: PAT_MRT4530_99123C.1.pep
MARSRRRRIVQSNEEYLSEEQIEEENTLPQLATPSEQETVCHDSGEGNEDIDDDFDINDGEGNEDTNDDVDIDDEGNEDTDVDINVRVENGAPETRGKTKLKDVWNLPKGLRIVVQCNDLNQAVGEEAGILGKFLGMIARNGSLCSLGYTDWRYVIGKREKNTNELKVKKDILKQVKMRFLYAPRMEEFILKKIGERWRQYKAKLKDLYFDVNETKEANCNNVPEGVLSDQWIALVNHWMNEKSKRISEQNKKNCQKKKAIHTAGTKSFARTREEMRQKDPAKKNPHRAVVYVHTHKRKSDKNINGHVDNLKRLIAEQPALADASKGKTAWKGDALNQILGDDKPGRVHGLGLVPKPKQVLDVPTSRRLQNINLTTVEDNSSEDVMAIRLQMEKLERHVENNDAKLLQLKEKATKLEKAQKNQRVYGDNPSQEICMFEEGNIMDQQDNSLMNTQSHVHDENLQPPTKHSTVYKNTQSLGQNHSGKQRKITSCANKRKGNLDQNELMQPGKSISSAYKNNKPDNQDNYMLNAHKVTSTHKNKENLTRKLVRPSLNKYSTASKKRQCNTMDFLTDNSTVEEHGDGPVQEICHVEQENIVMNSQSHVQDEDKTPPTKHATAHKNKRTFGLNDHGKQMEIICAKKQQCSKMDFITDNSMEVGTKVFLKSWKNRNTNMALATIVSCDPTRRVGGVELGNEFLMVHVDLALAKSEDLIRLYKGYKIVGHVVGLEIAWSAIFVDKING

SEQ ID NO: 203994 - protein, 695 aa, Oryza sativa
  unsure (1)..(695): unsure at all Xaa locations
  Clone ID: PAT_MRT4530_99124C.1.pep
KNIVQSNEEYLSEEQTEEENTLPQLATPSEQKTVCDDSGEGNEDTDDDFNINDGEGNEDTNDDVDIDDEGNEDTDVDINVRGNCXFNSPNVENGAPETRGKTKLKDVWNLPKGLRIVVQCNDLNQAVGEEDGILGKFLGMISRNGSLCSLGYTDWRYVIGKREKNTNELKVKKDILKQVKMRFLYAPRMEEFILKKIGERWRQYKAKLKDLYFDVNETKEANCNNVPEGVLSDQWIALVNHWMNEKSKRISEQNKKNCQKKKAIHTAGTKSFARTREEMRQKDPAKKNPHRAVVYVHTHKRKSDKNINGHVDNLKRLIAEQPALADASKGKTAWKGDALNQILGDDKPGRVHGLGLVPKPKQVLDVPTSRRLQNINLTTVEDNSSEDVMAIRLQMEKLERHVENNDAELLQLKEKATKLEKAQKNQGGLDGASTNKKAICDDVPNSKRRRVYGDNPSQEICMFEEGNIMDQQDNSLMNTQSHVHDENLQPPTKHSTVYKRKGNLDHNELMQPGKSISSAYKNNKPDNQDNYMVNAHKVTSTHKNKENLTRKLVRPSLNKYSTASKKRQCNTIDFLTDNSTVKVYGDGPLQEICHVEQENIVMNSQSHAQDEDKTPPTKHATVDKNKGNMNQNDHMQQGKNNSNAYKKQQCNIVDIMDANSLEIGTNVFLKSWKNRNKNVVVASIVSCDPTRKVAG

SEQ ID NO: 203995 - protein, 806 aa, Oryza sativa
  unsure (1)..(806): unsure at all Xaa locations
  Clone ID: PAT_MRT4530_99125C.1.pep
MDLSFRGEGERAPVYLCNKIKNFVIYFDHTDHVSGRNHEDILLTPAAELPEVFSPTRDDHQEPNLSTNEHTAEVNQKPKGIEEEEVEEYDLFEGSDDSSADSNFVDSDYEWEDDDDDLFEDNVDGGVVDIGLGKKRFSHKKATESKLKGKQVSTEDYTEQVSSDDEGLQLPDNSDDEGDITLRFKSFNPEDINNPVFKVGMVFPSVEVIRKAITEYSLKNRVDIKLPRNDRERIRAHCAEGCPWNLYASMDSRVKSFVVKTYVAQHKCKKEWVLQRCTANWLAEKYVDTFRADSKMTLSSFSRTVQKDWNLTPSRSKLARARRLALKEIYGDEVGQYNLLLDYGNELRKSNPRSSFYLSLDDSKFSRLYFSLDSCKRGFLSGYRPVICLDACHIKTKFGGQLLTAVGVDPNDCIFPIAMAIVETLKDDLGIVNTYPWTIMTDKQKGLIPAVQQVFSESEHRFCVRHLYQNFQMQFKGENLKNQLWACSRSSSVLEWNANMEMTKDLNEDAYNWLGEMSPNTWVRAFFSEFPKCDILLNNSCEVFNKYILEARELPILSMLEKIKGQLMSRFYNKQKEAEKWEGPFCPKIGKKLLKNAEHANICYVLPAGKGIFQVQERQSSYTVDVIGKHCDCRRWDLTAYEKKVGKPKKTRRKHPTEVQGKNGPKLTKHGVIIHCSYCHEPNHNKKGCPMRKKGIKPNIQIRKKKDVAPGSQEPSITQEMMGTQPRTSTGLLNEVNDNMLSVMMAESSQPSQITQQQGPLPNSVFIQQNQPSTRPVXLTTATKEGRAKITKAKKKVGSTTKKKKI

SEQ ID NO: 203996 - protein, 85 aa, Oryza sativa
  Clone ID: PAT_MRT4530_99126C.1.pep
LAHVSLKHLIQNDLVYVSGLLNSYHKVDPSGEKHTFYKIHVTDLNYVLDQNQRPQNDENSSDKSSMLSTTGISAELSCTVIFFSI

SEQ ID NO: 203997 - protein, 846 aa, Oryza sativa
  Clone ID: PAT_MRT4530_99127C.1.pep
MPSKILHFPPPCTVAGEIPLKSPNRLAPSQSPKSACFQGREESRAITTVVTSESTAIIGAAGLRERRRAAGLREGRLMTAPTSASMAMDLTFRGEGKQAPVYRPGSKYLSLEFHHGGFFCGLGVNRTYIDGKVDWFDNEDSREWGRVLHLPDFIAMLGYDSGPSLKVYWLLPGKTLVDGLRIVDSGVEINVMNSVCNKIKNFVIYLDHTDHVSGRIHEDLLLTPAAELSEVFSPTRDDHQEPNLSTDEHTAGFRTAKEDDDDDLFEDNVDGGVVDICLGKKRFSHKKATGSKLKGKQVSTEDCTEQVSLDDEGLQLPDNSDDEGDITLRFKSFNLEDINNPVFKDGMVFPSVEVIRKTITKYSLKNRVDIKLPRNDRGRIRAHCAEGCPWNLYAYMNSRVKSFVVKTYVAQHKCKKEWVLQRCTANWLVEKYVDTFRADSKTKFGGQLLTAVGVDPNDCIFSIAMAAVEVESYNIWCWFLQTLKDDLGIVNTYPWTIMKDKQKINLEWREYILEARELPILSMLEKIKGQLMSRFYNKQKEAEKWEGPFCPKIGKKLLKNAEHVNICYVLPAGKGIFQVQERQSSYIVDVISKHCDCRRWDLTGIPCCHAIDCIREERLSEQDFLPFCYSIEAFKSVYANNIMPCSDRANWEKMNGPQVLPPVYEKKVGRPKKTRRKHPTEVQGKNGLKLNKHGVIIHCSYCHEPNHNKKGCPMRKKGIKPKIQIRKKKDVAPGSQVPSITQEMMGTQPGTSTGLLNEVNDNMLSVIMAESSQPSQITQQQGPLPDSAFIQQNQPSTRPVVLTTATKEGRAKITRQRRRHEVLQRRRQISLSKKKVLLQGRRRGLD

SEQ ID NO: 203998 - protein, 494 aa, Oryza sativa
  Clone ID: PAT_MRT4530_99128C.1.pep
MAAAAASAPAAAAGAAARGGGVIPAGKGGSLRSPGKPVVLADITNTGRPNPTGSVHAIADVLKENAKLRHLLAERNKVIEVSRVELQKIRLALQAMQQKNLQLVQANSQMFAEINQGKDRIKLLQHELACTIAVLKVKGSELEKMSKTSNNQQNRAKILEKKTRSSKCAPTKAHQMAAGSIREHLVEIQSAVPSYTSCHEPPQDKTNKRCTNRRKSESCEVTMDTNTVQHSCRPHVEYNGSSHDDDPRKTRRRRSARLNPGSFEVAEICDKLHEDATVPSAPSSNVPKLQEPNAGKDMICGGKMKSLQKELPCDAIAQVVEAPELKEIQEAGSSVAGGEAHKFDIEDPEPPRKSMRIDANKRKLESFESRLASNKEDCINAICDSTSSVPIQHEQKRKLSRRKSSRLDPGPWEVTNGTFEIVQEDTVAPSAPSSSNALIEQTKNDMQNDRSCSTKPSDEQVIGRRSSVGRPSRRAAEKIVSYKEVPLNIKMRRP

SEQ ID NO: 203999 - protein, 50 aa, Oryza sativa
  Clone ID: PAT_MRT4530_99129C.1.pep
STTLHHSLFPPTSTTHPITTLHHSLLPTFLITMSNSKTSYIKKRREYPPL

SEQ ID NO: 204000 - protein, 183 aa, Oryza sativa
  unsure (1)..(183): unsure at all Xaa locations
  Clone ID: PAT_MRT4530_9912C.1.pep
KYLELLKKSRNLFLVYEAQKALIVIGSIDASFQXDKDXDFSSQSEFVFALNEAVVGXKSSKKDQVVDPPPELEYIAAFEQPKRLVXIKKFVPQLVVMTSASSPMDLYCDXSGAIAQAKEPRSHQKFKHILRRYYLIREIVGRGDVKICKIHTDLNVADPLTKPLPQPKHEAHTRAMGIRYVHD

SEQ ID NO: 204001 - protein, 63 aa, Oryza sativa
  Clone ID: PAT_MRT4530_99130C.1.pep
SKFMRARDANPLRRSRRRPIELLLLQTSTRACPGVEAEAAAARAHSGGGGARHDGRRQLPRRG

SEQ ID NO: 204002 - protein, 77 aa, Oryza sativa
  Clone ID: PAT_MRT4530_99131C.1.pep
KGLVLQRIEPPELYALGLLKGSSARMKENSLWCLVIDPYLIMFLHLSFKSIAFRPIKTSGCGLNIFPIALHTVDTLS

SEQ ID NO: 204003 - protein, 360 aa, Oryza sativa
  Clone ID: PAT_MRT4530_99132C.1.pep
MTGFDTAIATNCCLYELFLRYNFHKATKFGWVSLAFNYWLCDGMIQENIAKSISSALQQEIRWDCDDSSLDTALKEFMKEPPFMVVKDDNVYGAGQYHWISITSKDTEVSSMQALPAPPAAGFLTFETADDSNTKALPASFFRHSSNLGVLVLCYCGFDFASPPFLICHGLKFLGLDHCTNDSTCEGDQHVDWTALSSLYVLDLRYTEWDEITSQEKIALMYNLQELNIVGFRCWRHYARRLQGQLPCLRTLRVVKPTDQADISTDIANSFVEKTQLEILDLSGDTSMETIPNSMSNVDSLLVLIVDGCDKLKNVIVSDGVFPSLTSFSFDGYGPTYHWASTVELPPKEMRPFVDNKRDI

SEQ ID NO: 204004 - protein, 142 aa, Oryza sativa
  unsure (1)..(142): unsure at all Xaa locations
  Clone ID: PAT_MRT4530_99133C.1.pep
IASGRRAHASADAWAPASYRSCIHLEFDISGTGLTYETGDHVGVYAENCTETVEEVENLLGYSPDTLFSIHADQEDGTPLFGGSLPPPFPSPCTVGTALARYADLLSFPKKSALIALAXHASDPKDAERLRHLASPAGKRSI

SEQ ID NO: 204005 - protein, 99 aa, Oryza sativa
  Clone ID: PAT_MRT4530_99134C.1.pep
KLVLMVNYGIAPDFCCQKLVPFQVARSKYQGYFFVIPGGKSLSTQFFLGVGKILGSQLNPPRGFCPIFHCDKPLELLITYGHFPETQLFHMPPLPLPFV

SEQ ID NO: 204006 - protein, 422 aa, Oryza sativa
  Clone ID: PAT_MRT4530_99135C.1.pep
MGTRPCAGVASAVAAAVAVLLLAVSCFAAAATTTQKHGRMSGKGGDVLEDDPTGKLKVFVYEMPRKYNLNLLAKDSRCLQHMFAAEIFMHQFLLSSPVRTLDPEEADWFYTPAYTTCDLTPQGFPLPFRAPRIMRSAVRYVAATWPYWNRTDGADHFFLAPHDFGACFHYQEERAIERGILPVLRRATLVQTFGQRHHPCLQPGSITVPPYADPRKMEAHRISPATPRSIFVYFRGLFYDMGNDPEGGYYARGARASVWENFKDNPLFDISTEHPATYYEDMQRAIFCLCPLGWAPWSPRLVEAVVFGCIPVIIADDIVLPFADAIPWGEISVFVAEEDVPRLDTILASVPLDEVIRKQRLLASPAMKQAVLFHQPARPGDAFHQILNGLARKLPHPKGVFLEPGEKGIDWDQGLENDLKPW

SEQ ID NO: 204007 - protein, 72 aa, Oryza sativa
  Clone ID: PAT_MRT4530_99136C.1.pep
MPHGEVALKARVIPLYGGVVRKSPHGQYPQVPHMILGYWENMLTWISCKEHIDNHCGCPYEETCTGAWTTWS

SEQ ID NO: 204008 - protein, 222 aa, Oryza sativa
  unsure (1)..(222): unsure at all Xaa locations
  Clone ID: PAT_MRT4530_99137C.1.pep
MDRGDHHHLQQQHQFLMPPPAPVVPPQLCMPAMMADEQYMDLGGGGAAAAPGRGGAGERKRRFTEEQIRSLESMFHAHHAKLEPREKAELARELGLQPRQVAIWFQNKRARWRSKQLEHDYAALRSKYDALHSRVESLKQEKLALTQRRELIMLPGGEDGGKHRGATADEEAAATXGLAERPMRHRRGCGGAPRAGAVPEGGGSSSPSCTAPHCSWWPCSSP

SEQ ID NO: 204009 - protein, 73 aa, Oryza sativa
  unsure (1)..(73): unsure at all Xaa locations
  Clone ID: PAT_MRT4530_99138C.1.pep
PCPRISSFHMPEEAARAXYDVEARRLRGSKAKDNLPGTPAAARPRRGNTRATAVPPPATEPAAPLSRTGARNS

SEQ ID NO: 204010 - protein, 40 aa, Oryza sativa
  Clone ID: PAT_MRT4530_99139C.1.pep
MGVLLPNWEGRDPACGMPFTYKRMTSCRKHGEDGWMNRML

SEQ ID NO: 204011 - protein, 197 aa, Oryza sativa
  Clone ID: PAT_MRT4530_9913C.1.pep
MAVDDLNHHLIAVGVGEEAATAHCGLRTLVRNMAQLVVSLGILVAADKLVEQAFAAASIKFPSALFAMFCVFALLLFLPPSLANGFMAFFDPATVFIHRWLPLFFVPSLVVLPLAVRDVSPASALKILFITFGGWFASLVVAGYTALSVRRIVKTQLIPAEPMKRPSPFGPLEFWAWAAVFVASFAVAYVSPTALGT

SEQ ID NO: 204012 - protein, 75 aa, Oryza sativa
  unsure (1)..(75): unsure at all Xaa locations
  Clone ID: PAT_MRT4530_99140C.1.pep
SLKNPSPRAAGGAAPPRTRRSPPASSRRFATMKLTIANPATACQXKLLIYDDHELRAFLALRGGGEVRGVALVEV

SEQ ID NO: 204013 - protein, 708 aa, Oryza sativa
  Clone ID: PAT_MRT4530_99141C.1.pep
MAGAEVIMRAWNEWGIQALVLLSLTLQVSLLVLAEFRRCVNSGVLRFFIWSAYMMADGTAIYVLGHMSVTSSSPQHQLMAFWAPFLLLHLGGQDSITAYAIEDNRLWLRHLQTLAVQVAAAGYILYESSIVGSHSLLRWATMLMFVAGVVKYGERVWALRCADSSQMAKNYRTLQVSSRGFECSYYLDKIISGPPWDTETYLLMAHRMLEVPRIWLKGPPQNSLSQYPFASNLSGKDLYKVAEMQLSLMHDIFYTKVEVIHSNLYGLCIHMLPAMATTAAFLLFQLVILGREGHGYDRLDVAVTYVLLVGAVILETASLLRAMFSSWTCPLLVRWSRHKRGMEDNTVCNNLGHTITSLRRLVRAAQWRRRYWSCSMGQHNLLRLGVGSTTSRRSKMARWMGVEDWWNTKAYSWPIPVSECIQELLVNQVLEREGTASSSISMVLDEQDQFPIPSKGEEEEGSASHGSRPEADADDQLFDSKGRAELKRWGLYEGGQTLNGEERLTWSVEERILVWHLATNIYLTWWNKKQQKQDKQQPMAKAAEALSNYMMFLLAARPYMLSPTASRDSYVEMAYALTPAGGLRYDSTEQLASFLRTYGDTPEYDARGRLRHRYGSNLDFTTQHHLQLVLDTGCELGAKLISQDELQEAGADGKLGLIAQVWVEVLCHAGQQCSAYSHARQLSNGGELITVAALLVEYVTKRILTFPR

SEQ ID NO: 204014 - protein, 532 aa, Oryza sativa
  unsure (1)..(532): unsure at all Xaa locations
  Clone ID: PAT_MRT4530_99142C.1.pep
MAPCWAGSGSFEAGLRSPAPPPLTVSPKDSKPSPRLHRSRSTAATSKPPPSPPPDRRRDGAMRQKVSEMEEELRKEKDAAEKVQLLQREVEKAKESERKMLESLIYQTKQLEQTKISLEEAKLEITTLQQANASLEASAAAAVVSRRGGAVEQRSVKDLVFGGGDDEIRALRCELRTAMQGEEKSRKALDDLSVALSDVTMEAKQVKMWLSEAQAELEAANAEAERLRHELDAAEARLRDVSDEHDRCRLDAEECAAAWGDKERVLLDCVRASEEEVNRERQENTKLVESQRVIRDENARLRDILKQAVAEANVVKESLELARGENARLNDVVAEKDGALQSLRQEYECIKVSEAAAQGSLKEXNSVLAATKKTTXATGFSTPGSERTASVGDYGFDQHLPSVGFVSSAKGTPEAASHRWTAADKSRTSSIRRYLIGEPAKFKGGFSQSARMGNLNHKDRVFASLSNIADLKSAAEAAMSDFDDEFDHVDESHYDSMDQSMKQKKKRPILRKFGDLFRRKSFYKANLAPVHT

SEQ ID NO: 204015 - protein, 51 aa, Oryza sativa
  Clone ID: PAT_MRT4530_99143C.1.pep
GMPLQRSGWDLYSSLTIVGGRSSAPGSPGSRQSHLRPAWNLKGPASMKIAC

SEQ ID NO: 204016 - protein, 40 aa, Oryza sativa
  Clone ID: PAT_MRT4530_99144C.1.pep
KKPIHVQLNVVPCFFFFLFVANCCRSDTSIRCSLPLLDVN

SEQ ID NO: 204017 - protein, 118 aa, Oryza sativa
  unsure (1)..(118): unsure at all Xaa locations
  Clone ID: PAT_MRT4530_99145C.1.pep
TLLSLISLSVGQHHFTVSHQSLSXIHGGNSWLNKHSVSPHLXMPTRGVTLFFSPHHFKCSHTMVIPNTICISARLRSILHTPQALHHHRQQSTISLLSASSQLSCPYSLRSIRPCPGA

SEQ ID NO: 204018 - protein, 172 aa, Oryza sativa
  unsure (1)..(172): unsure at all Xaa locations
  Clone ID: PAT_MRT4530_99146C.1.pep
NSVHVACCWYTVFIAIHRLKNLVDNTSISTLGSICSDVRLNAINLVTSRDRQITCHPSSHRTTQALHLAIFLXNMAHRKAWATLPIVFDSXTENTXSPATFNSSMGPHISLLRVAKRKVRATRSKCLTHRMDRQSLSPPSTRALRLVIFLSIAAIERFXRRMKCSIHRLNRC

SEQ ID NO: 204019 - protein, 117 aa, Oryza sativa
  Clone ID: PAT_MRT4530_99147C.1.pep
MALQVQGLVDWRGRPVDPRRHGGLKAVMFIYVLIVMTNMGNIPTMLNIVSYLHGTMHMGIADASTTAANFYGAICVFSFLGAFISDSYIKRFYTILIFAPIEILASILNHSYIFRII

SEQ ID NO: 204020 - protein, 64 aa, Oryza sativa
  Clone ID: PAT_MRT4530_99148C.1.pep
MASFRRRLEGSRKGKELSYVDEANVSACPLPLACFGSESNTKVFGSFRSESNAKDWLFGSESDL

SEQ ID NO: 204021 - protein, 59 aa, Oryza sativa
  Clone ID: PAT_MRT4530_99149C.1.pep
MDFAGQQGGRPRRDGAAAVCDATEAAAASTAEACEAAANNIGEHGCILGSCSGLLLRTA

SEQ ID NO: 204022 - protein, 259 aa, Oryza sativa
  Clone ID: PAT_MRT4530_9914C.1.pep
MAEKEESTSIPLSQAAEAVDPEDPAKSPPRPSSPTTSTRKACCAVLQSWVSRKFMTGCVVLFPVAVTFFITWWFIQFVDGFFSPLYAKLGIDIFGLGFLTSLVFIFLVGIFVSSWVGSTIFWVGEWFIKKMPFVRHIYSASKQVSTAISPDQNTTAFKEVAIIRHPRIGEYAFGFITSTVVLQTDKGDEELCSVYVPTNHLYIGDIFLVNSEEIIRPNLSIREGIEIIVSGGMTMPQVIASLEPTPRKSQNIRLNRIMT

SEQ ID NO: 204023 - protein, 94 aa, Oryza sativa
  unsure (1)..(94): unsure at all Xaa locations
  Clone ID: PAT_MRT4530_99150C.1.pep
MRSLSMLHAAVYSTPPQNGTDLIAWALDMCRSSRGHLLHPIRLHTSMRAQTSQPLASLSQTPEQASRRSRAHKYTEPVVVDDTXALKQFSPLGF

SEQ ID NO: 204024 - protein, 171 aa, Oryza sativa
  Clone ID: PAT_MRT4530_99151C.1.pep
MPDTAAGSSHARRAASPSSRRRRRPVASTSYRRATGRAATLLVGSGRRPAGDEDTKPVAGDAGHGGNGKGKVLDAAGEPPKDYIHVRARRGQATDSHSLAERVRREKISERMKLLQDLVPGCNKVTGKAVMLDEIINYVQSLQRQVEFLSMKLSTVNPQLDFDVDNFIPKD

SEQ ID NO: 204025 - protein, 215 aa, Oryza sativa
  unsure (1)..(215): unsure at all Xaa locations
  Clone ID: PAT_MRT4530_99152C.1.pep
LRFRFEPDYECVARQQVGRCADILLNGIKYYARIQAIQDHYLKVKNRQLRDKIAGQQYLTKEQYFAQKPVWCNEEAWNALADDRCDPKFREKSEKNRANRASSKYKPHRGGSNXHCNSMPKTEQGRDVTEVEAWVHTHKGDNPNNPNMLNTQEATECLRRYKSKFAERNGDRSDPMSSPVDSLALYESNYGKPHGKWPLFNGVVNNKEALVEVKS

SEQ ID NO: 204026 - protein, 75 aa, Oryza sativa
  Clone ID: PAT_MRT4530_99153C.1.pep
KTNLRKCFAPPQRGDLYKVQKTCGKPQILAAGNLPQKWKKTPWCNRQTTETKRMPIKLQKWPYRQHPNGKKPPKA

SEQ ID NO: 204027 - protein, 123 aa, Oryza sativa
  Clone ID: PAT_MRT4530_99154C.1.pep
MDRNLIVFYLNFTKRIVGVNLIYDTIDESLSMIPMLSSHKATIHTTQMLVTRRRTTTAIDDDEGDYALTYLGKMAVEEKPADKPGDMPVISWPDVVYQWRPLSSLPSWKMIKRAKPSRRVDGR

SEQ ID NO: 204028 - protein, 74 aa, Oryza sativa
  Clone ID: PAT_MRT4530_99155C.1.pep
IHISITSQIHILNRINHPQQHHTSTSTSQKTTQVHTSQNQQVRTLTSALPTTPPPARPPPSPPHARLAAACRAP

SEQ ID NO: 204029 - protein, 111 aa, Oryza sativa
  Clone ID: PAT_MRT4530_99156C.1.pep
PPPLCYQWVFFFEPPGSGTRGCPPSPCGGGLFLVIPPFYRFCHFFSHFSPRGGVGFFFCNSWGSVPSFGGINPPPALGCVSSQHICSGGSPPRGGGGALKSKSNWCLLLKK

SEQ ID NO: 204030 - protein, 701 aa, Oryza sativa
  Clone ID: PAT_MRT4530_99157C.1.pep
MARGGSKLPIRKHNMTSSDLRLAPPTRGSSHGYAHGEPAIAGDSRRQTVFGHIFEGHGPYRGRPKQPASESDVGVGIGNESNDYAAAASQTNRRYGQVVRSLLLPKNISTPAAVQAFRGQGTMSLSDLPDEALLVILNKLDTREALRCSVLSRRWRRVPGMLPNIELDVDSFTPDHDDGFTSTLSDDARNSYAMVSAVQSLLSHESRHDIRRLDLSFFSRDESVGIIHAIDDAMARGRRILKMCFDVVSEKCYLECPDRDRVKQGKRLLYCFDAYPHVFAGLTSLHLECITVQGPCFSNVITACEKLSYLSLVYCDFGEETPLTIHHEHLRVVKLEFCTCDTVELEVPDLLKLMMSVWSWSPRRYPFVFGHAPRLQRLELAHAGLIDSKMLQLSKLLDNCTSLRELWLNFEREKIWILPETPTRLAPLLNNLTFVGVHRIHPNSGITWTLFLLEAAPLLKMLSIKVTDHQCKPIEGELLKRTLCEKNNIYWEPSDFKHYSLTMLIFYGFQPGKKCMEYIRQVIKRAVNLEDILLHDDRCEATREATTRPPPLLAAAGLLASSAQADRGPAQGGDGNDHQIRTAPIESCGAAAGDGDGDGSGDGDGRGEQRRAGMRPMAAGMATAVVESADPAAARRWTVLQAACPTSGAGVCGAPTLVVALWRQQAVVVRRTARSGSRFRSDASLVRSGVAWSPVVVIFDM

SEQ ID NO: 204031 - protein, 108 aa, Oryza sativa
  Clone ID: PAT_MRT4530_99158C.1.pep
SSVPGDLAVYLPNLRSQIQLYSYACPRVGDVTFAQLHSRQVPNSYRIVNLADVIPLLPPTTGLGTYVHVGQSWSFLSQGGDILPNHVVDTYQGAVDREVETDPQSNLQ

SEQ ID NO: 204032 - protein, 165 aa, Oryza sativa
  Clone ID: PAT_MRT4530_99159C.1.pep
MASLRTIPVIFGILFYVLASTATATDAPDYVVQGRVYCDTCRAGFETNVTEYIKGAKVRLECKHFGTDKVERAIDGVTDETGTYKIELKDSHEEDICEVVLVHSPLANCSEIEAERDRARVLLTRNVGICDNLRLANPLGYLKDIPLPICGALLKQFDLADDDNE

SEQ ID NO: 204033 - protein, 44 aa, Oryza sativa
  Clone ID: PAT_MRT4530_9915C.1.pep
GLPCALISHELAFSISGAHRAYLRARNCTIRMFANVICMVRQYF

SEQ ID NO: 204034 - protein, 73 aa, Oryza sativa
  unsure (1)..(73): unsure at all Xaa locations
  Clone ID: PAT_MRT4530_99160C.1.pep
EYYKWNFELNANLCTQYIYIQLERKLPPLESSXIKREREREKQGSKIHRAASPAAAELKAAMSWPPLPNVLVS

SEQ ID NO: 204035 - protein, 72 aa, Oryza sativa
  Clone ID: PAT_MRT4530_99161C.1.pep
ARRNKLNISEKIVRNYVTKPILNTTNWSVMIHASFRPQGFCPANISSLVHTVHYVERATWSGIKLSLKAQGS

SEQ ID NO: 204036 - protein, 508 aa, Oryza sativa
  Clone ID: PAT_MRT4530_99162C.1.pep
MPPKKVAKEKVAKQKKGGSEAEMVAEEGAEPSSSEGEAGAAHLRSWLPPLPSSAPTTSIDAEAAKVVAAAKALQVRDVVLSSQVPGAPSTTAFTQPASTSAPITTSQANATLEAQAEADMGAVRQNMAKLQDTLRQMQEQQQAYKAARQGKANAQQFHAQPQVIPSYAAKHRCTSSGLPQPLPNSISPTTTYKELRLRFRLREAQVKLHRRDSWWGSLPRQVKFKGLRLKSMSAAQPLVQAMASSFALPYPQLNWPAQQGAMIKSGTEKGLPLSWGIKNHPIPPQFKYPPVPQYSGETDSKEFLSIYESAIEAAHGDENTKAKLIHLVLDGIARSWYFNLPVNSIYSWEQLRDVFVLNFRGTYEEPKTQQDLVGIHQRQGESTREYIRRFLQARCQVQDITEASVIHAASAGLLEGELTRKLVRKEPRTLEHLFRIIDGYARDEEDTKRRREIQAEYDKAAAAAAAAVQTNTQAQVQTQAISSVPIQVQPAPLANQVPHPRPNQAPMT

SEQ ID NO: 204037 - protein, 50 aa, Oryza sativa
  Clone ID: PAT_MRT4530_99163C.1.pep
MALPPLHYRRCGGAQPTAVAQAPFRRGVGLGSTYLVEVMSAWLVSFYLGA

SEQ ID NO: 204038 - protein, 87 aa, Oryza sativa
  Clone ID: PAT_MRT4530_99164C.1.pep
MVEPCAVCPCCRAAPLALGLASIATAAAKARHTRAMSNLSSGRRCDLHLNRGDHRHEGADELEAVNMLAKKVWVVQNAKKAKISSPK

SEQ ID NO: 204039 - protein, 337 aa, Oryza sativa
  Clone ID: PAT_MRT4530_99165C.1.pep
MDAVLVTAAIFGLLLCGCSVSGVEGIGVNYGMIGNNLPSPDKVIALYRASNITDIRLFHPDTTVLAALRGSGLGVVLGTLNEDLARLATDASFAASWVQSYVQPFAGAVRFRYINAGNEVIPGDEAASVLPAMRNLQSALRAAGLGVPVTTVVATSVLGSSYPPSQGAFSEAALPTVAPIVSFLASSGTPLLVNVYPYFAYSADPSSVRLDYALLSPSTSAAVTDGGVTYTNMFDAILDAVYAALEKAGGQGLEVVVSETGWPSGGGGAGASVENAAAYSNNLVRHVGRGTPRRPGKAVETYIFAMFNENQKPEGVEQNFGLFHPDMSAVYHVDFSA

SEQ ID NO: 204040 - protein, 49 aa, Oryza sativa
  Clone ID: PAT_MRT4530_99166C.1.pep
HFLPCLNIIVRNTNYSLNCICTNQQFSLLYCMYFRDKDMNRYFKENSYS

SEQ ID NO: 204041 - protein, 55 aa, Oryza sativa
  Clone ID: PAT_MRT4530_99167C.1.pep
MAPSMEMEISVLDGNDTTLDVVVVVVVRRIRVEVETGAEAESREALKTRGAKKRR

SEQ ID NO: 204042 - protein, 391 aa, Oryza sativa
  Clone ID: PAT_MRT4530_99168C.1.pep
MVDVDRRPPLPHGLPRPPSHAAGLRRLSTRASAPTTPRASPATPSPSSAAAAAPSPSALVAHLAAAGVSVLPGLSDPELAHAEAALGGLQLPPDLRDLLAIGVPSGDGFPDYRSPAGLRLLRFAAEEVPAAVAAALPGRRAGGRGRWCSSSPPPLVPLYGRHYVPAVPCLAGNPVFHVSDTGVAVAGANIAAFLLRAFAAEPPRGAPLRRQLSAPMPPPAPSPAPSTARRSLDSATGKAPRWIEFWTDAAAAGDRFVEVSTCTSTRANAAPQWVRSYLEWAGSVLRRGGWGGGEVEEMTTGSGGGGEEAVALALTVDRCCGELGRAGWGAEEVVEALGALLGPRTRKRPAVALPPDVAARVGRLAEAVSRAVFTGSGSGSGGNPEPAKRPF

SEQ ID NO: 204043 - protein, 263 aa, Oryza sativa
  Clone ID: PAT_MRT4530_99169C.1.pep
MSMIDVLIRVDAICKKYDKYDADKHRNGAAGDPFSRLYAAVDADIDAAVERSERAATETNRAAAVALNADVRRTKARLTEEVVKLRKLAAKKVKGLSPEEALRGDLVLALPHRIQSIPDGGGGAADQYGGGNVRPGIKFDSSGFVVFLKLDEGLEFISEGLDTLKSLAEDMNEELNRQMPMMDEIDNKVDKSNEDLRKTNVRLKETVNQFRSTRNFMIDLILICIILGIAAYLYEQHTQSMNLTGSVITCSGITCSKIPGVND

SEQ ID NO: 204044 - protein, 285 aa, Oryza sativa
  Clone ID: PAT_MRT4530_9916C.1.pep
MDAELLELQRQLEAAQSARSSVRLSERNVVELVQKLQERGIIDFELLHTTSGKEYITSDHLKHEIKMEIKKRGRASLVDLSDILGVDLYHVERQSQKVVADDPSLMLINGEIMSQSYWDTVTEEINEKLQERSQIALAEIAAQLHIGSELVVNILEPRLGTIVKGRLEGGQLYTPAYVSRITAMVRGAARGITVPTNLPSVWNSLQLQLQEMHGASGVSVEGSFFQSIFNGLLKEGVVLGSVRAGVQWTPAVFAHAQKESVDAFFSQVKKFLFSIMQENCIISLH

SEQ ID NO: 204045 - protein, 72 aa, Oryza sativa
  Clone ID: PAT_MRT4530_99170C.1.pep
MEATTDGKKMEAIYHPQGIPQALSFVPRRGRRLVRRRDRKATIDVAWWVVMTMTVVIWRRMMANNSRDEDDS

SEQ ID NO: 204046 - protein, 82 aa, Oryza sativa
  Clone ID: PAT_MRT4530_99171C.1.pep
RLGFTVDRVHGGGSRTPRSNPIQSDGRDLMGLPRLTESDDDDVGDDVITGDGSDGASSPAKYGTTALTKGIYRLRTTRRTHL

SEQ ID NO: 204047 - protein, 104 aa, Oryza sativa
  unsure (1)..(104): unsure at all Xaa locations
  Clone ID: PAT_MRT4530_99172C.1.pep
WSPSPPPKLPLPSLLSEPPEIPRRCHAAHTAPRRSRPPPPPLPATTGPSPARRRWIWEGEGAGRLARRARPAPRRXGRHPAARHARPSPSGVENREERGEESRE

SEQ ID NO: 204048 - protein, 83 aa, Oryza sativa
  Clone ID: PAT_MRT4530_99173C.1.pep
HNLGQTKQPFVIQAGSSYNYQPKGGSLHTVSVFLQLSTKGILKVKQMQAISPFLFLFFLLHDSKMVGKQHFRTTQQIRKQSWE

SEQ ID NO: 204049 - protein, 529 aa, Oryza sativa
  unsure (1)..(529): unsure at all Xaa locations
  Clone ID: PAT_MRT4530_99174C.1.pep
GRENSRCDNTFSRKSYCNATCFEKGVSSQLIQDLERLNLGIVEHGFVTMLEAQPTLVEQXAELKKIMRVGKARDFPEEEQGTIWMGERLCVPDNEELKDLILSEAHQTQYSIHPGSTKLYQDXEKFWWVSMKREIAEFVAMCGVCQRVKAEHXAGLLQPLQIPEWKWEEIGMDFITRLPRMSSRHDSIWVIVDRLTKVAHFLPVHTTYTGKXISXLYLARIICLHGVPKKIVYDRGSQFTSKFWXKLQEELGTRLNSSTAYHPQTDGQTERVNXILEDMLRVCALDFGGSWDKNLPYAEFSYNNSYQASLQMAPFEALYGRKYRMPLFLDQTGERQLFGTXVLSEAKEKVXRAIRERLRIAQSHQKSYADNRRRELSFEARDHVYLRVMPLRGVHSFQTKGKLAPRYVGPYRILERRGEVAYQLELPPNMASIHDVFHVSQLKKCLRVLELQASPDRIEIHEDLTYVEKPTRILETSERRTRNKVIKFCRVQWSHHLEDEATWKREDELKAAHPHLFASSSESQGRDSV

SEQ ID NO: 204050 - protein, 61 aa, Oryza sativa
  Clone ID: PAT_MRT4530_99175C.1.pep
PSSAYEAVYTNKRSDDELVPLKRRYDEECLTCDYIAHDLLHMETPRDGPMIRTSVKPKRIL

SEQ ID NO: 204051 - protein, 142 aa, Oryza sativa
  unsure (1)..(142): unsure at all Xaa locations
  Clone ID: PAT_MRT4530_99176C.1.pep
NIIINRYNCLLRTLSMRGNHLEAYQLNPTMYTESYSWNRLYRLALSDSNSADPDXADPDSSRFLLCSXIDLRLRFHFDLIFFSDADITKFANFILSLSGDSSNAXGDPQATSSPARLPPAAMSSSAIPSAAPPAEYAEKLIT

SEQ ID NO: 204052 - protein, 418 aa, Oryza sativa
  Clone ID: PAT_MRT4530_99177C.1.pep
MGIYYGRRKEKRLRITQSLAPAASAAAAAPVPDDLLVSEILARLPVKTLTRCKSVCRSWRAALEDPSFVRRHLELSRTRTPPSALVIPHDGGDFLSRCISFHRLRSPEHTATDAAAAAATAELMLEATCPEEIGCGFVPSRATRRPGSSCSCRSAPMPGSPECFWPAAAIGYDPWRDRYVVCRYFDLSTEPFFDEATGRETSYWRLGHEIFTLGGGGGDSWVETDPPPPPGRHWPIGELGAICVRGDFYWLSYTAAGAAGDGEAEMALLRFGLRDAKFDVVRGPRGCTCRRRTPSSSDDGYFYFTDRVVDLSGKVCYVHAPLAADFLELWQLAGDHDQEWSPRCRINLLERGIVIRKEGFVPVYHHGEDMLLVLDDEQLYRYNERTRAIEEVANLERELESMSGRTAPWGTKYLMVLK

SEQ ID NO: 204053 - protein, 152 aa, Oryza sativa
  Clone ID: PAT_MRT4530_99178C.1.pep
VHNRATTLIQSIREFGVACCILPGPCIFQQFANSTCTAAGAASNLGPPVKNPLMHRCWDQPSSSNIPKPDILQGSPHSLLLLSAAHPGCHLLRPGAANQAMASMFPHLKSISMFKVCVIDSSKSHPVCCLILASRGRNWVAILESSQSWLRV

SEQ ID NO: 204054 - protein, 86 aa, Oryza sativa
  Clone ID: PAT_MRT4530_99179C.1.pep
SIFTISVSGKSFWDLSVFLLTVIPTQAYFPSIFNVRCNHPVTKHHISKHERGGNSAVKPRTYKRVESLTTGSGVQVPPKQQTVFSY

SEQ ID NO: 204055 - protein, 56 aa, Oryza sativa
  Clone ID: PAT_MRT4530_9917C.1.pep
GLNRALIWHSVLLYGPREWTRLEEGDKIDEWAGLKEGRGQAGLAWPWASWFGMGMG

SEQ ID NO: 204056 - protein, 146 aa, Oryza sativa
  Clone ID: PAT_MRT4530_99180C.1.pep
MATGAAAKGGGRRGRGWLGGSAFLPADLATRRREGCGSGSGDSIRRRLVPPPLPLSESPLPFPRRHHPLSLSQIWRAGSDGSGVVEAEAAAGLGSGGVKADPAVVVLTGHFKDDDGNLRSWIDNIVGPLKNALAKIGFRRRFYDRL

SEQ ID NO: 204057 - protein, 150 aa, Oryza sativa
  Clone ID: PAT_MRT4530_99182C.1.pep
MGMRIVASSKQAGGRDAGRDELMEPEEVARRQSRSRSATAASADRPTPLSQPLPLNRRRTQPPTIHADAAVAATLIRSARSPSLDSGSEKVTIVESTLQIGWIDGYTIMSRLTHAVTAATTQSADSAVAPSPIHCRQVVSIIYPIHQWST

SEQ ID NO: 204058 - protein, 385 aa, Oryza sativa
  Clone ID: PAT_MRT4530_99183C.1.pep
MAATTPAAAAAAAHVVHIEAVQTAVPTRVVEPGRTRLVAVAAPPLPAPALQRRVRAVLYYRGAGGAAPGAWEDGVWVKESLSEALADHPEMAGRLRRRADGSWEVKLNDTGVRLLQATVDATLDEFLAGKGALARREAALAPWTDVNADDPDMCPPFFMQLTRFQGDGGYAVGVSCALVLADPLTLARFLLSWARTHARIRAQGKATPLPMAQYLAYFQRPETTRKRVRSVPIDSFAGDGDGDAETVLFRAGTAAAAAADGGHGDHRALAAACVDKASEALGKKDKVSRLSVVVVDAAGGDDSLAGKTTIETCTASPGGGAAAGGASLEAVQWSELGLEELVLRGSKPVHVSCSIVTGGGGDEGLVVVMPDDGAGSLLVMATLPK

SEQ ID NO: 204059 - protein, 606 aa, Oryza sativa
  Clone ID: PAT_MRT4530_99184C.1.pep
MLRRFAARRLRPPATAGYPSSAAAAAAAYAHGGGASVLPDGLDRASDAHARNAAAVGGLLSDLRARVSQVLAGGGAEAVRRNKARGKLLPRERIDRLLDPGASFLELSQMVSRPTDQLQLYEHFIPGLTTKLAGSGVYEEALPSGGIITGIGPVHGRLCMFVANDPTTKGGTYYPITVKKHLRAQEIASECKLPCIYLVDSGGANLPRQAEVFPDRDNFGRIFYNQAKMSSDSIPQIALVLGSCTAGGAYIPAMADESVIVKGNGTIFLAGPPLVKAATGEEISAEDLGGASVHCKISGVSDHFAQDELHGLTLGRNIVKNLHLAAKVPNVQNSACDYQEPLYDVQELRSIAPADMKQSFDIRQVIARIVDGSEFDEFKKLYGTTLVTGFARICGQPVGIIGNNGILFTESALKGSHFIELCAQRNIPLIFLQNITGFMVGSKSEASGIAKAGAKMVMAVSCSKVPKITIIVGGSFGAGNYGMCGRAYSPNFLFMWPTARISVMGGIQAAGVLAQIEKNNRKRQGVEVLSKMITFALTQWTKDEEEAFKAKVVEAYDKEGSPYYSTARLWDDGIIDPADTRRVLSLCLSAAAKPVPEDTKYGVFRM

SEQ ID NO: 204060 - protein, 79 aa, Oryza sativa
  unsure (1)..(79): unsure at all Xaa locations
  Clone ID: PAT_MRT4530_99185C.1.pep
GIRFNCSRRRVRTDIAASXGVALEPGAARAMEEREAARSPWPHREPEEVASLVAFLCMPAASYITGQVICVDGXRTITA

SEQ ID NO: 204061 - protein, 92 aa, Oryza sativa
  Clone ID: PAT_MRT4530_99186C.1.pep
FLVFRVVLVAPVLPVFCLGLSWLCVSYLMSAMFSSSPYCLFCLRVGLRGGSLLESFCTLLEVSPSLCCKLMSGFPSTTFGLSIEARSLTFFY

SEQ ID NO: 204062 - protein, 95 aa, Oryza sativa
  Clone ID: PAT_MRT4530_99187C.1.pep
CYAGRVLGHDARELHDVARHMSSSKTIYSYCSTIGYKNERCVKRDCCGCRPMVTTMPCYVYELMFAVYVESRLITSGHTRILPAWQAAFSLSTTD

SEQ ID NO: 204063 - protein, 106 aa, Oryza sativa
  Clone ID: PAT_MRT4530_99188C.1.pep
MSPVVLSLLPHSLTLLLLLSLADLTASDYLDDNRPRGGRICTTSNLVASGSIAGDYGTGEPTAHNYRMGILTTEDLATSGSGAIADYWMGGSIDDDDNDNDSSDDS

SEQ ID NO: 204064 - protein, 45 aa, Oryza sativa
  Clone ID: PAT_MRT4530_99189C.1.pep
ERAKKHVMEHESAACAPSQQWATRPTIHRSCIAAVGILFFFSLHI

SEQ ID NO: 204065 - protein, 572 aa, Oryza sativa
  unsure (1)..(572): unsure at all Xaa locations
  Clone ID: PAT_MRT4530_9918C.1.pep
ASTSSTTGWIXHRRLVFSPTRLVGHTTVHRRPHLHRPVGFRHRRLVSPPTWLAYYAVVVGRLRLHRQPAFLAADWCPRLHGWLVTPPFIGVHVFTDRLDFAAADWCLRLHDXPIMPLLLPAFVAADWCPRLHGWLVTPPFIGVHVFTDRLDFAAADWCLRLHGWPIMPPLLGVYDFTVSLPLSSPTGVLAYTVGWSHPRSWASTSSPISLPLSPPTGVSAYTAGLLCRCWWASSLSPSXPSSPPTGVCIVIDGRLPLREWISQNITTGLLSPPPTSVLAYTVGWSHRCYWASLSSPTGRLVRRRLVSSPTWLVGHATVVGRLHFHCWLASVAADXCFRLHGWPIMPPLMGVYVFTDQLPSPPRMMPTGAIVFTAGHVAATANRRRHLQCKLSMSAADWSLHFHGCMILPVLIGLIVFMPSPLRLVYTATTTDGHHHLPSPTGYIAADWCFYLHNYASSLXVCFRCRRLVFTSSRLCNFVTMVERLHLYYLRHRQTQLSQLRMFCYFTNHVYKSFDISACTSIFDAVLFYYNKWFPNFQDFYSDILNTYLYSCNEYSMTRSYSSRLYVQLPSN

SEQ ID NO: 204066 - protein, 111 aa, Oryza sativa
  Clone ID: PAT_MRT4530_99190C.1.pep
ASQNLGLLLKHLFPPGGGFSRGAPRCFKKTTPTPLGFKGSISQGLTKPPRPPLIFPGNGTWGGSPYLAGGAPPRGPGLAGNPRCPPSQGGGGDRFYLYPRTGGATPWTPPF

SEQ ID NO: 204067 - protein, 94 aa, Oryza sativa
  Clone ID: PAT_MRT4530_99191C.1.pep
ASRQLGAVMVLADLSDLGGLGVEGGGFFSRRCWWVSMFAATFFATSILGSLPPLYFLSVFFVRRIGEEEERLGLLLQASNGRVDLRDGDEIPPG

SEQ ID NO: 204068 - protein, 52 aa, Oryza sativa
  Clone ID: PAT_MRT4530_99192C.1.pep
NKGCRGNQGGFDQKPTLRSQFPYKNPLWGKTNIMGGHTGLFSLVPKLKGEFF

SEQ ID NO: 204069 - protein, 114 aa, Oryza sativa
  Clone ID: PAT_MRT4530_99193C.1.pep
TRSNPPIKLTQKKKKKNYSSSSANPAKAAATSRSQATTTSSFARSRIFFCFFVCSFPRRKEARRRKRSLRGWRDRSRELSNSSKVIGVELVRLEKSLIFSCLLSSFYFFLVLLN

SEQ ID NO: 204070 - protein, 483 aa, Oryza sativa
  Clone ID: PAT_MRT4530_99194C.1.pep
MSTVMTQIFVKGLTGKTTALRMEPSDTVKSVKVKLVDKEGLPPDQQPLIFQGHQLDDGHTLIYYGIQEESTLHLLGRICGGGGGNKKRKKKAYATPKKGKHEHRKEELAVLRHYRVDDVMGKVERLRLMCPNPECKDTRTSKQPCRKGDLAKASRIGIRSNASFASWARGCSTSGASFGPPFRVGLLCLRRCPPPSSRCTVSKVAGVLPPLHVAPSTRCRASASFSMLRRPITASVVTVILLPFHVVVGVLLPCRYGGRPRLSKGRASPDWDASHMGLTWAGIPDEEPSDTVESVKAKIKDMSGITEDFWLRYDGKQMDEVGSRTLADYGIHDPATEMEIFVRGLMGNTRTLWVKPSDTVKSVKGWQLKDGDTLASCGIWKYSNMNLCYHFADSYLRESVLMRSTVTLRVKLRMEPLDTVDRSEVGWRRRAEAAAAVLALEAKGRGDVEAEAAPVLEAEGGGGAMQAKAEAWRRRDGCEAVRG

SEQ ID NO: 204071 - protein, 653 aa, Oryza sativa
  Clone ID: PAT_MRT4530_99195C.1.pep
MVAAGAAAAAAAAPRVNPSPSPHRRRASSALSPSKSANSNANANADAARGGGGGGGKPKGKAVPSRYLLAPSSKSTSTSSSSTTTTNSSATSNSTSTSASTPSRRFASPLPRRSSSVDRPRPTSNAAAAGGDALGPNGATTTTTRSLSVAFQGRAYFLETSKAKPATSPSPVRRPVAAASTTPERRRPSMGTVPERGKVFEGGHSQQRWPMSARAAHGFEGNPLTKSLDCSLDKRGAAVLAAVRSLRQSMVFEEGVRRASFDSGDYLMSSDTESVSSGSNSGSQDAGMGRARSSPKGMSVPARFLQDAAASRPNRLADPSTPFMTHSSGFASSPRTAPVKKSLLNGFVSSPLNRPIRQPSPSKLVGSRRMSSPSQPRGSVGVSASYGDQHGRSSSGYGLDSQVKRRWLGCSKVDCEHLLRILCNRHLQWRCVNAQADAALAAQKMTAEKYLSDAWITTLGMRKSVALKRFQLQLFRNNWKLMTVLKGQMDFLEEWSFLERDHANSLSGIVEALTATILCLPVTDGAKADIQDVKNAVGSAVDIMQTIGSSICTLLAKLSGTSILVSDLAKIATQERTLMDQSRELLSTLASMHPLSAYERLRRGALGTAVDADVKPVPARDGVNLMEKARPKPQPTHWAVAPGHTQPDQGWVS

SEQ ID NO: 204072 - protein, 102 aa, Oryza sativa
  Clone ID: PAT_MRT4530_99196C.1.pep
MDNCQDLVQKIIGVRASTLLASNGSIIGHVEGRPQKQDLIVSIFTSFAVQLLLIAHDSYGLSHRLSHNNILAMGNGTAVRGAWRSRITDRVTVVFLLPLRDV

SEQ ID NO: 204073 - protein, 468 aa, Oryza sativa
  Clone ID: PAT_MRT4530_99197C.1.pep
MERPLHLLLVFLSSPWLLLLQGVSSLQFTRDDFPHDFAFGAGTSAYQYEGGAAEDGRTPSIWDTYTHSGRHPEDETGDVASDGYHKYKLPKGAIVPQLMSKEGAGATQTRRSHRRHSSKGGRRSDVSWWDGIQIHVVMYHMDLPQSLQDEYGGWISPKIVDDFTAYADVCFREFGDRVVHWTTVLEPNAMAQAGYDMGILPPNRCSYPFGSNCTAGNSSVEPYLFIHHSLLAHASAVRLYREKYKVAQKGIIGINIYSMWFYPFTDSAEEIGATERAKKFIYGWILHPLVFGDYPDTMKKAAGSRLPIFSNHESEMAVKWFCLLLLKQFVPGTIVDPRGLEHALKYIREKYGNLPIYIQENGSGSSSETLDDVERINYLAKYIAATLKAIRSGANVKGYSMWSFVDLYELFGGYSTWHFGLVAVDFDSEKRRRQPRRSASWYSEFLKNNSVIRVEEDGFVSAASHAQL

SEQ ID NO: 204074 - protein, 53 aa, Oryza sativa
  Clone ID: PAT_MRT4530_99198C.1.pep
TRNDILLLIRKPTCCSLRLNAILLQLFNLVHQNRSHCFPHINFETQTSLFFTA

SEQ ID NO: 204075 - protein, 461 aa, Oryza sativa
  unsure (1)..(461): unsure at all Xaa locations
  Clone ID: PAT_MRT4530_99199C.1.pep
MGNSLGCSASGERLVSAARDGDAVEARMLLELSPALARYSTFGGLNSPLHFAAAKGHLDIVTLLLEKGADVNVRNYCGQVFHFRTAQAWRWTRGNSRILTGLAAQACSGAEEAATGRSSVMQRSMLDSFFFLVVNISGFIAAQXWEMSSGYFFCLPSCVSFPYXAKIFLIGEVNPAAFGCCSFYCIVAFWLQMCVVPVILDSPKITSYSSLXVCKLQELVGICFLSKLNIARPDYVLCRIAIISETVKLGREFGLLHTVASVDDSDLCAVCLERSCSVAAEGCCHEFCIKCALYLCSTSNTRVEFTGPPGSIPCPLCRNGIMSFTKLPSTPTEGLKSSSALTFCNPCMLNTRSVDSPATISKAEIRRNRVAAVSSELVCPLTCSPFPSSALPTCRCSDDDPCDAIETQDGSEVQSPQPSHCASMEMDKREQQDLDRTSCSGMFWSRRSCHREEQCNAEINA

SEQ ID NO: 204076 - protein, 125 aa, Oryza sativa
  unsure (1)..(125): unsure at all Xaa locations
  Clone ID: PAT_MRT4530_9919C.1.pep
GRDQSAGEIDRSAMATRIWRRNTSPALLLLLLLAVTAAAAEARRAAVGMRQLKSASSSSQHDDPATSDDEGPVLFPSLTGTLPPSHLSGGSSGRASPLPVAGLAGGDEEVSFPAKHAXGGAALRS

SEQ ID NO: 204077 - protein, 202 aa, Oryza sativa
  Clone ID: PAT_MRT4530_991C.1.pep
MVAIIYDDQVDRLDPLLREGSAYYVSRMSIEPASMILYQWLADHAFVCVFTRDTTITEIANMHEKILPLLPPLMPLDQVFEFTYHNDIYVDVIGMVIFVSSIGFVEGYKKRIPYRNILIIDGSFKPVMLVIKDKMLTDHLTKWARCSNEQPIIVATMRRAKREEDHSLHTTCFSRVQFDPNVAVARELRKSLSMELTGKSSP

SEQ ID NO: 204078 - protein, 136 aa, Oryza sativa
  unsure (1)..(136): unsure at all Xaa locations
  Clone ID: PAT_MRT4530_99200C.1.pep
RSDSYKLACGCSRFTWIREVESNRDLNRVVICQSLEACSAGACGHXPQPDDPSASWRYQKWRSASFRFSDDHTCADASCHWACFLCSHQLLRPLTRECVNPSVLWRKRIRVQNFLPVQQYFGXDQRRWEWRHCVSV

SEQ ID NO: 204079 - protein, 954 aa, Oryza sativa
  Clone ID: PAT_MRT4530_99201C.1.pep
MAATASSTADALEQIKNEAVDLEHIPLEEVFQHLKCTREGLTNAEGDARTQVFGPNKLEEKKESKILKFLGFMWNPLSWVMEVAAIMAIALANGGGRPPDWQDFVGIIALLLINSTISYWEESNAGSAAAALMKNLAPKTKVLRDGRWSETDAFVLVPGDVINVKLGDIVPADARLLDGDPLKIDQSALTGESLPVTKLPGDCVYSGSTCKQGEIDAVVIATGVHTFFGKAAHLVDTTNQVGHFQKVLRAIGNFCIGAIAIGMAVEVIVMYLIQHRLYRDGIDNLLVLLIGGIPIAMPTVLSVTMAIGSHRLSDQGAITKRMTAIEEMAAMDVLCSDKTGTLTLNKLSVDRGLIEVFVQGVAKDEVILLTARASRVENQDAIDTAMVGMLDDPKEARAGIREEHFLPFNPVDKRTALTYVDLADGSWHRILDLCKCRQDVRSKVHAIIDRYADRGLRSLAVARQEVPERRKDGPGGPWEFVGLLPLLDPPRHDSAETIRRALHLGVNVKMITGDQLAIAKETGRRLGMGVNMYPSSALLGQSKDESIASVPVDELIKKADGFAGVFPEHKYEIVKKLQEMKHICGMTGDGVNDAPALKRADIGIAVADATDAARSASDIVLTQPGLSVIISAVLTSRAIFQRMKNYTIYAVSITIRIVLGFMLIALIWKFDFSPFMILVIAILNDGTIMTISKDRVKPSPHPDSWKLPEIFITGIVYGTYLAVMTVLFFWAMRSTDFFTSTFHVKPLMEKDEMMSALYLQVSIISQALIFVTRSRSWCFVERPGMLLCGAFVAAQIIATLVTVYATLGFAHIKGIGWGWAGVIWLYSIVTFLPLDIFKFAVRYALSGRAWDTLIEHKIAFTSKKDYGRGEREAQWATAQRTLHGLQTPEMGDHLGGVGGGERSSYRELSEIAEQAKRRAEVARLRELSTLKGQMESTVRLKGLDMDNVQHHYTV

SEQ ID NO: 204080 - protein, 87 aa, Oryza sativa
  unsure (1)..(87): unsure at all Xaa locations
  Clone ID: PAT_MRT4530_99202C.1.pep
VLDDENHILVHRTADCTLDATKYVDAGGCADXGELLTDTXVLDGTKDKPEWREGPAYWTPRSRMGHSVPWHGGRKVLMLGGNAKSGP

SEQ ID NO: 204081 - protein, 39 aa, Oryza sativa
  Clone ID: PAT_MRT4530_99203C.1.pep
LTSALPLKLYKPMVFDEVFTILVLSIALRAVGMLLTRLL

SEQ ID NO: 204082 - protein, 44 aa, Oryza sativa
  Clone ID: PAT_MRT4530_99204C.1.pep
MANGSNQITQERPVQTYLVMYDLVALSMIPEASQTANVLFEVVQ

SEQ ID NO: 204083 - protein, 395 aa, Oryza sativa
  Clone ID: PAT_MRT4530_99205C.1.pep
MSHCDGLVLFPTDTKLYVINLTTSDVLRLPDNQESDTLRQATGLGLDPRTNMYKVARYFYRSVDHTIGTYDAAMEVFSIGQDAFWRETSEVPPYPVRSMESPIHSKGYLFWNIDERFLKGQSRGFLCFSLEDETFSLIPHPCPYLPLNHGTSLVSELDGELCVGLFISGQQQLWMYNGNQWDQRFSINVPGPNDLYIPLDILPHDQLLLQRGPHLYHHNHQSSEDIKEVARMDQLNYQSPPGEPYVYMENGYQLLFLSAIIQAYLTKNFLFNLKQDGKVLPNGPVVISPDVYFLHCTRKVASSLQYLHILDDDILHYYPLAKTPKSGGDRLYEEHHMSLRLHVWRDTDKLSYKKMGIPKGKIFIINPKVSLSFFPSCKDYNSWNYWKMPSPNVDL

SEQ ID NO: 204084 - protein, 639 aa, Oryza sativa
  Clone ID: PAT_MRT4530_99206C.1.pep
MLDNFQDDTGREMHTREVLSHVIFETHAGETNITIGKSEEISQFVTVKTCQDCSDANSPVYETAGLSSEMHDISSITSAQDACQEKVVIVSSYETVETSYNVPDILVDKVCHAVGNPLDDSLQPKEQSGVSIEEIEHVSFEDKPLSYYGASSNIEDMTKLGIQDQQVPVFEDSGSQNSQEFVPDKDICVDTVVNDRSAHIVNDLACNHDFVFPAASSSVEEISNYVPDNHLHDVTKDFIVENKTCNGELNISLVQTSTTGDETTECISPSANIPNKVELQGSQIISDLSSLRKVEAESTTLEDTESRSSSASGVEIKLVPEAIYEPREEAEAVVSFSEFVEEIQFQFSDSESFADRKTTDDAASTKEAGAVEHDESDCDTEQQGGNNTGLGNNLENCSDSSRPETIPVPIPGSEFHSDDNNLEAKSLPNLRSHIHDLERSDSFQLSRSLQSNGENNGVEPVKSTTSDLPIQEPEDTGDSKENFVPPEPTNSAIADNLKIDPFNPCVELSLCRHLLSEGMGEDAACKAFDAEKVTLEKFRAMKQSLIRNNKLVVRIAGRYFPWDAAAPVILGMVSFQEEQSFEPQGMIKVERVEPNAAPGGWRIWPFSFKRTRSVNTVQPVSESTEEASSSAPVKEVERE

SEQ ID NO: 204085 - protein, 52 aa, Oryza sativa
  Clone ID: PAT_MRT4530_99207C.1.pep
MRDCSYRARRACYTTRMMTVRLVRLTESTVSLLNDWIEAAMRTTVPNDHPAL

SEQ ID NO: 204086 - protein, 58 aa, Oryza sativa
  unsure (1)..(58): unsure at all Xaa locations
  Clone ID: PAT_MRT4530_99208C.1.pep
RSTGSSSASSPXTRLPPIEILYLPSKCSRVYXXHVNLEFTEXTHMLVIKSRXLQDRLS

SEQ ID NO: 204087 - protein, 74 aa, Oryza sativa
  Clone ID: PAT_MRT4530_99209C.1.pep
MDERSDLYRYLAVQVPGEAVARWQPGAARVEAVAAAAWRGGCDGGPHGGSYDLARGQQRPGTGAEVAARVGQRQ

SEQ ID NO: 204088 - protein, 331 aa, Oryza sativa
  Clone ID: PAT_MRT4530_9920C.1.pep
MAAAADNEVAVITHRTVDANGLRMHVAEAGPPGAPPVLLLHGFPQVWYAWRHQMRALADAGYRAVAPDLRGYGDSDAPAAELQYTAMHVVGDLVALLDAVVGAGKPVFVVAHDWGALTAWNLCLFRPDRVRALVSLSVAFTPRSPARRPVDGLRALYGDDYYICRIQEPGAIEAEFARLGTELVLRKFLAYRTPGPLMMPKSGWGSPDDEVPLPSWITEEDIKYYASKFDKTNFTGGLNYYRALNKTWELTAPWTGAEIKVPVKFIVGDLDLTYHTPGIQDFIHKGGFKKYVPLLDDVVVMKGVGHFISEEKPKEVSEHVISFIRKLSAEM

SEQ ID NO: 204089 - protein, 238 aa, Oryza sativa
  Clone ID: PAT_MRT4530_99210C.1.pep
MGYFYKEIHIAGSRQITHGQAGHKCPFMQKSLPQEVIQGSHVTIYFCMRPLKRSTYENRWRGDGGHRGGRALACGSTAPNLRNSDGRSERPQRPAGRSAVHRSRRHPHPRERAATTAGGRIRCPCPSEQRRWADPPLPPSGATVEANGHGDQQENSPPPPSGATAVQGYAALVLGSSGLRQWDGSRGDDDGSDGGCDDDNDGNSCTMTMAVMAAPTTLVVVAAPTTTAAVTSVDGRYP

SEQ ID NO: 204090 - protein, 137 aa, Oryza sativa
  Clone ID: PAT_MRT4530_99211C.1.pep
YRCPVSRPPEALSRNLSPKTSLRFFPQVFAMCPQKLSSSISTWDRKPPRLGTHAFVSKAVPGGMRVKPPYINIVRASRHTTHLTCNCIRRSVVPVVNGYARQGYYQVRSKCGSDNTSNQSHRVRWLNCSSQSSHLPQ

SEQ ID NO: 204091 - protein, 65 aa, Oryza sativa
  Clone ID: PAT_MRT4530_99212C.1.pep
MAKTMDQRRRRAENHSGASQSQRPLGRRISTWITAENKRHHPIGKNFERNAVEHLSQVLTVARFT

SEQ ID NO: 204092 - protein, 472 aa, Oryza sativa
  Clone ID: PAT_MRT4530_99213C.1.pep
MEPRVGNKFRLGRKIGSGSFGEIYLGTNIQTNEEVAIKLENVKTKHPQLLYESKIYRILQGGTGIPNVRWFGVEGDYNVLVMDLLGPSLEDLFNFCSRKLSLKTVLMLADQMINRVEFVHSKSFLHRDIKPDNFLMGLGRRANQVYIIDFGLAKKYRDTSTHQHIPYRENKNLTGTARYASVNTHLGIEQSRRDDLESLGYVLMYFLRGSLPWQGLKAGTKKQKYEKISEKKVATSIEALCRGYPTEFASYFHYCRSLRFDDKPDYSYLKRLFRDLFIREGFQFDYVFDWTILKYQQSQIASAPPRAVGHGAGPSGLAPPALQNDRQSGVDEGRTSGWSSMDRRRAPPPIASVGTLAKQKAPVGNDASFSKEPVISASNFLGRSSGSSRRPAVSSSRDVMPIDTSEPSRTRATDASPGAFRRTSGPQKSSPVNSAEPKHSSSARHSSNVKNYESALKGIEGLNFDGDERVQY

SEQ ID NO: 204093 - protein, 69 aa, Oryza sativa
  Clone ID: PAT_MRT4530_99214C.1.pep
MAKTMDQRRRRAENHSGASQSQRPLGRRICRFDNRDRHEENKRHHPIGKNFERNAVEHLSQVLTVARFT

SEQ ID NO: 204094 - protein, 75 aa, Oryza sativa
  unsure (1)..(75): unsure at all Xaa locations
  Clone ID: PAT_MRT4530_99215C.1.pep
PPTQKMFPGGSKQFPPKFRRKAFWPWDTGEGRDEMGFPEAESNMNDPGAEDHQDQGAPADEESEXEKEEAEAEKQ

SEQ ID NO: 204095 - protein, 148 aa, Oryza sativa
  Clone ID: PAT_MRT4530_99216C.1.pep
FITMIIVLNSLAITIFITGDMITVHQSSVASRYLRRRRRRANSRGVGVGVEGERRGGNIAARRNRPQHPRTMISDDLHNCAYAGTLGGEEKWAAAAVASGSNFRRCSLRSQLPPPPPPPHSQARPQLPQQVRAAAVACRSAEEKPRAG

SEQ ID NO: 204096 - protein, 228 aa, Oryza sativa
  Clone ID: PAT_MRT4530_99217C.1.pep
LQPLQITSYDYDAPIDEYGILRQPKWGHLKDLHTAIKLCEPALIAVDGSPQYIKLGSMQEAHVYSTGEVHTNGSMAGNAQICSAFLANIDEHKYASVWIFGKSYSLPPWSVSILPDCENVAFNTARIGAQTSVFTVESGSPSRSSRHKPSILSLTSGGPYLSSTWWTSKETIGTWGGNNFAVQGILEHLNVTKDISDYLWYTTTVNISDADVAFWSSKGVLPSLTIDK

SEQ ID NO: 204097 - protein, 114 aa, Oryza sativa
  unsure (1)..(114): unsure at all Xaa locations
  Clone ID: PAT_MRT4530_99218C.1.pep
SLIALSASVATAISTIWHFPATXCMITTDSYKDNMMKTVGMGRYTDMFLSQTMTPLQQQCCMQLQRMMAHGNCDTSYHMMHSMQQVICAELYQQHMMMNMTMQMPYMCNMVPVN

SEQ ID NO: 204098 - protein, 64 aa, Oryza sativa
  Clone ID: PAT_MRT4530_99219C.1.pep
LATNLSDMLSIHILRVYMPELCFHIYSPNDIWGTMAIYPIGEGGKRLLHMCEEQRPLRWYITKL

SEQ ID NO: 204099 - protein, 80 aa, Oryza sativa
  Clone ID: PAT_MRT4530_9921C.1.pep
ADDMHKPWPYLLLHHHRHETECIKEAHFPHPYTPYIENNLTPKAVAMPDLGIADTSGLNTLQSVNGHKSRNRQLLCSKCT

SEQ ID NO: 204100 - protein, 168 aa, Oryza sativa
  unsure (1)..(168): unsure at all Xaa locations
  Clone ID: PAT_MRT4530_99220C.1.pep
LRIWRANPRVFFDMTVGGAPAGRIVMELYANEVPKTAENFRALCTGEKGVGKSGKPLHYKGSTFHXVIPQFMCQGGDFTRGNGTGGESIYGEKFPDEKFVRKHTGPGVLSMANVGPNTNGSQFFICTVETPWLDGMHVVFGQVVEGMEVVXVIEKVGXRSGATFKEVK

SEQ ID NO: 204101 - protein, 56 aa, Oryza sativa
  Clone ID: PAT_MRT4530_99221C.1.pep
GTKSHIKAAPNATDSVHSHFTHCSSKGSTQRLGANPMTPGSLYHYAFQPCVPQLSF

SEQ ID NO: 204102 - protein, 62 aa, Oryza sativa
  Clone ID: PAT_MRT4530_99222C.1.pep
EPWGRLECWCERGRAGASNSLDYCFDLLLPGVDHAVPLVESSIAASKGDKFAVDLTSMQPQS

SEQ ID NO: 204103 - protein, 74 aa, Oryza sativa
  unsure (1)..(74): unsure at all Xaa locations
  Clone ID: PAT_MRT4530_99223C.1.pep
PSSSHCRIALHFPNFITLRFTGANHTGFCTXFQQSLVAVHKQPTPIYQSSCLMLCYGLGQVVQLTPIHHHIALQ

SEQ ID NO: 204104 - protein, 341 aa, Oryza sativa
  unsure (1)..(341): unsure at all Xaa locations
  Clone ID: PAT_MRT4530_99224C.1.pep
PNPPPPPLGPLALPPFPLPSRGPAQLGPPSPPKSAXPFLASSLLPSPTGGPEAPPVSSSPFLQPLRRQPPWQPGSPHVAAKTAASCLPRAHPTVRTWSPPTPPPSPPPNPPPPPLGPLALPHFPLPSRGPAQLGPPSPPKSAXPFPASSLLPSPTGGPEAPPVSSSPFLQPLRRQPHGNPGRPTSPLKLPPPASRAXRPTVRTWLPPTPPSSPPFFPKFXVPIRAPPRPXSPAPIPPSNPPPSSRPLPPLPPSPXAPFAPPASPRVVTPRPSLIFPNPLPXRPHPPRTHFPHSPHENRRQLTPPPQARGAPSPSRLSPVPCRLVSIPSPSSLSPPLMPSPL

SEQ ID NO: 204105 - protein, 181 aa, Oryza sativa
  Clone ID: PAT_MRT4530_99225C.1.pep
MAQQAHAAAVVVGVLLYCCLCLFVGVVAGEHGGGGGDIKRQYKAMFSFGDSLTDTGNICVNMSAVNRTELTMAQPPYGITFFGHPTCRCSDGRLVVDFLAEGLGLPLLPPSKVIGGDFRRGANMAIVGGTALDFDFFESIGVGFPFWNYGSMNVQLRWFRDLLPSICATAAPQSMYVVSCV

SEQ ID NO: 204106 - protein, 65 aa, Oryza sativa
  Clone ID: PAT_MRT4530_99226C.1.pep
QLLPLPPASPPATAWKPGSPHVTAKTATSSPTSPAPIPPSNPPLPSSISSSPRTSTPHPFPPLSP

SEQ ID NO: 204107 - protein, 188 aa, Oryza sativa
  Clone ID: PAT_MRT4530_99227C.1.pep
QSDSPPAPAFFLAIPKSWDEIPEAPPVSSSPFLQPLRRQPHGNPGRPTSPLKLPPPASRAHVRPCGRGCRPLLHPLPHFSPNFCANSSSTSPTSPAPIPPSNPPLPSSISSSPRRAQALPLAGDPPVGRCRRCRRPRAAPFAPPASPRVVTPRPSLIFPNPPSTASPRSAVTISPLSGAVPLGEHPLP

SEQ ID NO: 204108 - protein, 1139 aa, Oryza sativa
  Clone ID: PAT_MRT4530_99228C.1.pep
MIPIGTLTPSLLTFAVLYAFLTLPLIPSLSSTALDDESNKDLQALLCLKSRLSNNARSLASWNESLQFCTWPGITCGKRHESRVTALHLESLDLNGHLPPCIGNLTFLTRIHLSNNRLNGEIPIEVGHLRRLVYINLSSNNLTGVIPNSLSSCSSLEILNLGNNFLQGEIPLGLSNCSNLKRIVLHENMLHGGIPDGFTALDKLSVLFAHSNNLSGNIPHSLGSVSSLTYVVLANNSLTGGIPPVLANCSSLQWLDLRKNHIGGEIPPALFNSSSLQAINLAENNFFGSIPPLSDLSSIQFLYLSYNNLSGSIPSSLGNSTSLYSLLLAWNELQGSIPSSLSRIPYLEELEFTGNNLTGTVPLPLYNMSTLTFLGMAENNLIGELPQNIGYTLKSIEMFILQGNKFHGQIPKSLAKATNLQLINLRENAFKGIIPYFGSLPNLTILDLGKNQLEAGDWTFLPALAHTQLAELYLDANNLQGSLPSSTGDLPQSMKILVLTSNFISGTIPQEIEQLRNLVLLQIDHNLLTGNLPDSLGNLSNLLILSLAQNSFYGKIPLSIGKLNQLTELYLQDNSFSGLIPKALGQCQKLDILNLSCNSLEGTIPKELFTISTLSEGLDLSHNRLSGPIPVEVGSLINLGPLNISNNKLSGEIPSALGDCVRLEYLNMEGNVLNGQIPKSFSALRGIIQMDLSRNNLSGQIPEFFETLSSMVLLNLSFNNLEGPIPSNGIFQNASKVFLQGNKELCAISPLLKLPLCQISASKNNHTSYIAKVVGLSVFCLVFLSCLAVFFLKRKKAKNPTDPSYKKLEKLTYADLVKVTNNFSPTNLIGSGKYGSVYVGKFDAEAHAVAIKVFKLDQLGAPKSFIAECEALRNTRHRNLVRVITACSTFDPTGHEFKALVLEYMVNGNLECWLHPTSYKNRPRNPVRLSTRIEIALDMAAALDYLHNRCMPPIVHCDLKPSNVLLDNAMGARVSDFGLAKFLHSNISSTSDRSTSLLGPRGSIGYIAPEYGFGSKISTEGDVYSYGVIILEMLTGKRPTDEMFNDGLNLHQFAKEAFPLKIGQILDPSIMPDYENEDNDANNDLDHDNCLMDGMLNCVTKLVKLGLLCSAVAPKDRPTMQSVYKEVAAIKEEFSALHG

SEQ ID NO: 204109 - protein, 130 aa, Oryza sativa
  unsure (1)..(130): unsure at all Xaa locations
  Clone ID: PAT_MRT4530_99229C.1.pep
MLMLTIHHADSKRMKLFLKLASGICNSLILRPLELVLTRMTSLVAKRIGGTGRRILKNHFTKKCRRARGDILQIGFSENLSLGFDHLAQPMVELALIPLYHAQKFNPNFETILCIKSLSRXQPGYTKRQV

SEQ ID NO: 204110 - protein, 297 aa, Oryza sativa
  unsure (1)..(297): unsure at all Xaa locations
  Clone ID: PAT_MRT4530_9922C.1.pep
LFLKRKRRIIAXRARVSVDRAHGXGSRERTAEIDPSKTDGRDRSVYDRLTEEGDDDVSDDVTTGGGGSAXSGLHARRRTAALRHERRAPTGRARRGELTGDQRRNGGGLRVDGGDGAPAIFGDGEGADEDGDATATTTXSSRVTATSGMAAAHSWSDGGDGGARAHGARALRTTRGEGEGGGGGXEATAKAHGGWRREGRFRVRRKETDPIRTRIKHIPNRFSRCFQRRKGRXDPKDCFPSINFTGNEKERWXPPVSGRTRARAAADWADLGRGEREXVLGRLSAKAKRRLFKTFFN

SEQ ID NO: 204111 - protein, 239 aa, Oryza sativa
  unsure (1)..(239): unsure at all Xaa locations
  Clone ID: PAT_MRT4530_99230C.1.pep
AAPTAVMSALCDPETGECPVRYDVQTEDLPVLEDKVAAVLGCMLALLNRGRKEVLSGRSGVASAFQGSEDSTMDKIPPLALFRGDLKRCCESMQVALASYLVPSEARGLDIWRKLQRLKNACYDAGFPRADGHPCPTLFANWFPVYFSTVPDDSLSDELEVAFWRGGQVSEEGLEWLLLKGFKTIVDLREEDVKDDLYLSAIHEAVSLGKIXVVNLPVEIGTAPSAEQVQRFAEMCLIV

SEQ ID NO: 204112 - protein, 61 aa, Oryza sativa
  Clone ID: PAT_MRT4530_99231C.1.pep
MPTTSSRPAPPRGRVLSSGPAWRKALIQVQVRGEEPLINGDGMEQPQVMPPANNRRVCTTL

SEQ ID NO: 204113 - protein, 86 aa, Oryza sativa
  Clone ID: PAT_MRT4530_99232C.1.pep
VGPTKKSFYFSSPSSFSLPKRYPMAAGELAAVARPWLSLASCPCSQALDLSPPPAPGTSPTRWPSGARQSRQPRPRSSTGQPPGGG

SEQ ID NO: 204114 - protein, 114 aa, Oryza sativa
  Clone ID: PAT_MRT4530_99233C.1.pep
QHVNKTESAVRITHMPSSIAGQCQNGRSQHQNKDQCLIQLRAKLYQMEMMKNNAEKQAMEENKSDIGWGSQIRSYVLDDSRIKDLRTGVENRNTQAVLDGDLDRFIEASLKAGL

SEQ ID NO: 204115 - protein, 56 aa, Oryza sativa
  Clone ID: PAT_MRT4530_99234C.1.pep
SGYDCIIQSLCFMRGFISSLCSPVEFNMILLCISQFTCCLASWYVYKVGYPLGLVF

SEQ ID NO: 204116 - protein, 46 aa, Oryza sativa
  Clone ID: PAT_MRT4530_99235C.1.pep
VGWWHYNDPIKSGQMELDFKAKLVSDRQQNSSVNIPWAIANQNSQK

SEQ ID NO: 204117 - protein, 524 aa, Oryza sativa
  unsure (1)..(524): unsure at all Xaa locations
  Clone ID: PAT_MRT4530_99236C.1.pep
MGACFSSHTATAAADGGSGKRQQRKGDHKGKLPDGGGGEKEKEAARVEFGYERDFEGRYQVGRLLGHGQFGYTFAATDRASGDRVAVKRIDKAKMVRPVAVEDVKREVKILKELKGHENIVHFYNAFEDDSYVYIVMELCEGGELLDRILAKKNSRYSEKDAAVVVRQMLKVAAECHLHGLVHRDMKPENFLFKSTKEDSPLKATDFGLSDFIKPGKKFHDIVGSAYYVAPEVLKRRSGPESDVWSIGVITYILLCGRRPFWNKTEDGIFREVLRNKPDFRKKPWPGISSGAKDFVKKLLVKNPRARLTAAQALSHPWVREGGEASEIPVDISVLSNMRQFVKYSRFKQFALRALASTLKEEELADLKDQFDAIDVDKSGSISIEEMRHALAKDLPWRLKGPRVLEIIQAIDSNTDGLVDFEEFVAATLHIHQMAELDSERWGLRCQAAFSKFDLDGDGYITPDELRMHTGLKGSIEPLLEEADIDKDGRISLSEFRKLLRTASMSNLPXVQEDLQIHNPCERR

SEQ ID NO: 204118 - protein, 39 aa, Oryza sativa
  Clone ID: PAT_MRT4530_99237C.1.pep
LKKCETFLLVVINIIYIIVIMIFIALKVTILFIIYDDLK

SEQ ID NO: 204119 - protein, 608 aa, Oryza sativa
  unsure (1)..(608): unsure at all Xaa locations
  Clone ID: PAT_MRT4530_99238C.1.pep
MGACFSSHTATAAADGGSGKRQQRKGDHKGKLPDGGGGEKEKEAARVEFGYERDFEGRYQVGRLLGHGQFGYTFAATDRASGDRVAVKRIDKAKIPPLGVHSVTRFSLDKTSQESQLVLRYLQSSQDHPPDLTGLGALHQNVVNGLHFLIAEEAIPPMVRPVAVEDVKREVKILKELKGHENIVHFYNAFEDDSYVYIVMELCEGGELLDRILANFHSRTASRAIRPLLTGTFHFVRKNSRYSEKDAAVVVRQMLKVAAECHLHGLVHRDMKPENFLFKSTKEDSPLKATDFGLSDFIKPGKKFHDIVGSAYYVAPEVLKRRSGPESDVWSIGVITYILLCGRRPFWNKTEDGIFREVLRNKPDFRKKPWPGISSGAKDFVKKLLVKNPRARLTAAQALSHPWVREGGEASEIPVDISVLSNMRQFVKYSRFKQFALRALASTLKEEELADLKDQFDAIDVDKSGSISIEEMRHALAKDLPWRLKGPRVLEIIQAIDSNTDGLVDFEEFVAATLHIHQMAELDSERWGLRCQAAFSKFDLDGDGYITPDELRMVQHTGLKGSIEPLLEEADIDKDGRISLSEFRKLLRTASMSNLPXVQEDLQIHNPC

SEQ ID NO: 204120 - protein, 133 aa, Oryza sativa
  Clone ID: PAT_MRT4530_99239C.1.pep
MAEFVGGCRCPSPSRCIASHQGPDPPELEPEPSLSLLLLREFVPADEPDITKHEKPTTTCTSTNPMSTTVMPPSLTATGTDTSDHHATATASVFNGLGRTSSSPSNVADGCCHGLGLHQARRSVGRSVEEGGR

SEQ ID NO: 204121 - protein, 104 aa, Oryza sativa
  Clone ID: PAT_MRT4530_9923C.1.pep
MVLRRSSATAKGRTRTATRRRPRRRSSRATATSGTVAAHSWSDGGDGGARAHGARALRTTRGEGEGGGGEAEGGASHPGAAVGEGGASQLSRPEIYTISKRSVH

SEQ ID NO: 204122 - protein, 107 aa, Oryza sativa
  Clone ID: PAT_MRT4530_99240C.1.pep
MLFLHVQNGPVIGVLWATPKGYSGCDADKDARRVYRGCPAFLVDNQTASLHAVVCYAYRFSATPFGRELHIEVLDSHNARGPPRWVLFEAFLRFFLPVVRPLSPLAS

SEQ ID NO: 204123 - protein, 227 aa, Oryza sativa
  unsure (1)..(227): unsure at all Xaa locations
  Clone ID: PAT_MRT4530_99241C.1.pep
MGQHLQHIRAVLSVVRANHLILKRSKCHFGEQQINYLGHVVFANRVAMDVQKPWAFRGGLILRNDRVXPTSSPTLPALSPPAPXTGHEGVERTLHRLCTDFFTPHAKQVVQEFMSTCSTYQRNKTEHLHPAGLLQSLSVPTQVWEDIAMDFIKGLPRVHGKTTIFTVVDRLSKYAHFILLGHPYTVTIVARVFFNKVVRLHAIVIKTGPENEPVKLSVHWSSGSTTG

SEQ ID NO: 204124 - protein, 106 aa, Oryza sativa
  Clone ID: PAT_MRT4530_99242C.1.pep
MSTPCSCIICGVGEKDCDLAPFTPVGSRGPPPGGLPPTPGGVHLRRKGPYRRPRKPTEVRSQAKCPGDLRAQSRALKATELAQGPRRIRSWLKGLQSSYQEFGAGA

SEQ ID NO: 204125 - protein, 459 aa, Oryza sativa
  unsure (1)..(459): unsure at all Xaa locations
  Clone ID: PAT_MRT4530_99243C.1.pep
YLGIPIAIDRLTVADFSIPPNKIEKRLATWKCGHLSYGGKAILINSCVSSIPLYMMGVYLMPESVHQKMDSIRARFFWEGLEXGRKKYHMMKWEALCRPKDFGGXGFINTRIMNVVLLCKWIFKLESGVEDPCCDLLRKKYMSNGGGFYQSRTEGGSQFWRGLHEVKNWMKLGRSYKIGNGKAVSFXDDTWLGDVPLKTQFPIIYSICADTKKTVYQMCPNXEWTINIRRNLGGREMTEWNDLHTLLDEIQLNSDNDTMCWKLTKYGIYKTKSLYRELAFGGVRDVIMQDLWRTPIPLKIKIFFWLMLRGRIQAASQLKKMKWKGSPYCKLCGELEDVNHFMFNCPISKFMWCCFRDAFGWAGIPRTRGELLDKLKMQSCDENRILLSLFAAGAWAIWLIRNDWVFNNKLISNATHLPYKAVSFHLQRRKLALVKTRSSLDTSRDLLLASIRRIASSNA

SEQ ID NO: 204126 - protein, 54 aa, Oryza sativa
  unsure (1)..(54): unsure at all Xaa locations
  Clone ID: PAT_MRT4530_99244C.1.pep
MATTATLPFSCSSTLQTLTRTIPLXLRLHXXRFLHHLPXLAXLPRLPXPRPPLL

SEQ ID NO: 204127 - protein, 54 aa, Oryza sativa
  Clone ID: PAT_MRT4530_99245C.1.pep
PPPPARISRWGTVAMATALRKLSYDALRRQPISRITPIYYMASLPATEERSGVT

SEQ ID NO: 204128 - protein, 743 aa, Oryza sativa
  Clone ID: PAT_MRT4530_99246C.1.pep
MSTSASPSVTPLAEYVEHLSNLVAIPSLSHDRQYFLGPIGNPGPTEFISAETNRIPFRLANPNLGHRKNTFKSWPSIEKSSPEKSWPMWFKRVSASKKAYFWSNTLFNQGPMTPTLLDITMITGLDVTTSANPMNLNTKSIGGCCGPTTNWQFLAEALETKRQFPLGKILLGYLYQMSNNASAKIAVGSVVGAGGPWWLLQSWLNLVAMKTVNRLAVTEAEFPRLEPITDDDGEERTHRRCMSYGEYASTPADAGAKLSAELLKDWFVSFYDGFQKDARVWFLYADSMDFDLPTDFRFEDINHERYQKSREVFTTAISPCILPVGIHQGRNIQASDEFYHPMSSARQFGMGQLPIGLYFADKIQCRGEISSTLMMDRLLNIQGPPLGSIENIELARFRSRAFDRWWGEWKLHLFHQSASMYMTDLFLDVIPQTTESSPPHKSNSGRDIEYAPGLIPNGGGLTPLVIGHHAPRTSSLLQGQLREPADAGKKRKAKASAVDPSALAPKKKAKKKSKPADDLPALDPSIEQALDEEEIEDDVDHATAELSDPGEKTPSASPKQTPSTPAAPAPFSRKKKTAMKKKSAPMASKTAPPPPPPPSPLVQPESSNRTPSAAGSHNVEEEEQLAAPAIPVLTDLFSFDIKDYLDEETEEDTTSKALAPLSDDLKKTLEDISHRLKGSSLDNLVVDCGSIRTRLHKIQSLIPDELADALTPAVYLEQHQFKLEKAKQRLADRRERKEIEATI

SEQ ID NO: 204129 - protein, 72 aa, Oryza sativa
  unsure (1)..(72): unsure at all Xaa locations
  Clone ID: PAT_MRT4530_99247C.1.pep
MDESTSALDGDEKRRSRKESPLPEEKFNIFLLCTAFVYRVMNGLXTLATIWATVVLLGGFSTLVKKQDFWPL

SEQ ID NO: 204130 - protein, 86 aa, Oryza sativa
  Clone ID: PAT_MRT4530_99248C.1.pep
MWVRRKRRQCEKATLLARRSGGDRENKGKITISQYADRQQFAHIVEMSLSWQARAPSSRFAQPLTLIYPVAGSISPPLARLDTHCR

SEQ ID NO: 204131 - protein, 91 aa, Oryza sativa
  Clone ID: PAT_MRT4530_99249C.1.pep
FLCFFFFFFFFFWVGFFFFFGAQTSQLIGRCLKRDLQKLVRGCFQTKKGASQLDRGSNFSTRWKLNLPPMLYFSWKKLWEGNSNKLLWGPI

SEQ ID NO: 204132 - protein, 82 aa, Oryza sativa
  unsure (1)..(82): unsure at all Xaa locations
  Clone ID: PAT_MRT4530_9924C.1.pep
RIITLAKIWTELHNNIMSIRTDLKLNVEXTSPCCCLNELNQSPCSGRKNMSQVPPVTVXKLCLKRRGLPLRAENRIWKFRYT

SEQ ID NO: 204133 - protein, 62 aa, Oryza sativa
  Clone ID: PAT_MRT4530_99250C.1.pep
MIFLDLKANFISVNKSWLFTTCARKNGRSQDKQNTKPGNTNATRCQQIKPTMSCSNKQRGKQ

SEQ ID NO: 204134 - protein, 88 aa, Oryza sativa
  Clone ID: PAT_MRT4530_99251C.1.pep
MACGGVEMKGKKRAATRIHLIWVAGYAGEEDGAWRRNDGWRSAKLRRQRQLWHMRGEESVVMHRGWRVRARARAHARVGATGLGFDAD

SEQ ID NO: 204135 - protein, 453 aa, Oryza sativa
  Clone ID: PAT_MRT4530_99252C.1.pep
MAIECAASSPFTRDGEETAPRSMMETYGEMSSKPVLLASRRKLVALSSFCFCLHSSRYFSALALGDPSVKIDDVTPKIFPSGPLFPTEKRIAELFETNTYSVVNIFDATLRPQLNVTGVVEVRVESRIPEGNGSGVVWDDSGHIVTNYHVVGNALSKKPKPGEVVACANIVAANGIQKNFEGKLVGADRSKDLAVLKVDAPTDLLKPINVGQSSALRVGQQCLAIGNPFGFDHALTVGVISGLNRDIFSQAGVTIGGGIQTDAAINPGNSGGPLLDSKGHMIGINTAIFTQTGTSAGVGFAIPSSTVLKIAPQLIQFGKVRRAGLNVEFAPDPIAYQLNVRTGSLILQVPGGSAAAKAGLVPTSRGFAGNIVLGDVIVAVDGKPIKGKSDLSRVLDDYGVGDKVSLTIQRGAETLEMVPQYTSEFLLIIRHNPLKIMMQSVHPDDLIDVSICR

SEQ ID NO: 204136 - protein, 106 aa, Oryza sativa
  Clone ID: PAT_MRT4530_99253C.1.pep
MWRGERARRRPRLGSHHCAAPQPSLTAFNAVRANMRRDQTVTGLSPVTSDRTGSRAPTFAPVPSGVEAEGMTGLSPVSGGGRRWVPLKDGLLLSFRAKARIVVRSR

SEQ ID NO: 204137 - protein, 120 aa, Oryza sativa
  Clone ID: PAT_MRT4530_99254C.1.pep
MAGPHAAATRRARRRPRRRGRREAAPAPLWLPAAAIGTAERRPREGKGRGKEAAVDGDGGVPAVGELGKAVDGVGGGGAKPEETTPRRGTVPVSGLNRFEHIGFASSWRLLVQSNSRFDR

SEQ ID NO: 204138 - protein, 166 aa, Oryza sativa
  Clone ID: PAT_MRT4530_99255C.1.pep
MRMINRADKGPYTRLVGTVCTGCRFEGAMPPFSNRIVRYDVGSSTVLPSLTLLLILDFSCGRLEFGNEWCRPRKFHLQFEFNKSSSFENSCFIIRVVATHAYVVTVTIGTYVRGNLSFVNGRPANSTQRRPVLRNRGMQRARMCALSLRNRGHMPSQNFYLVTSNV

SEQ ID NO: 204139 - protein, 476 aa, Oryza sativa
  Clone ID: PAT_MRT4530_99256C.1.pep
MAAAADLYGRLNRSSTRGFLAYVAAGAACAAVLACFVIPAAEPRAGDANGGLRLSSRSARVWPDLAFNWRVVVATVVGFLGSAFGTVGGVGGGGIFVPMLNLLVGFDTKSAAALSKCMIMGASASSVWYNLQVSHPTKEAPVIDYKLALLFQPMLMLGITIGVELSVIFPYWLITVLIIILFIGTSSRSFYKGILMWKDETRIQMETREREEESKSSCAARDVVIDPSCEEPLLCQPQPKEKSALETFLFNLRWKNILVLMTVWSSFLVLQSPGCSSRSCSTFYWVINILQVPVALSVFLWEGVQLCRESRARRMDGNWGVCLWRPLIEWSPAQLISTRPCGLLGGTVGGLLGSGGGFILGPLLLELGCIPQVASATATFVMMFSSSLSVVEFYFLNRFPIPFAVYLICISILAGFWGQSLVRKLVHVLKRASLIVFILSSVIFASALTMGVVGTQKSISMINNHEYMGFLDFCEK

SEQ ID NO: 204140 - protein, 93 aa, Oryza sativa
  Clone ID: PAT_MRT4530_99257C.1.pep
GPEPPGRTTPACLAPARRPAAGGCFVTGPPIIPAYPRPVASIPRERPLGEELQRTTYTGGRGGLDSPLPSLLLPPRLPPPPPPVIERSHRISG

SEQ ID NO: 204141 - protein, 56 aa, Oryza sativa
  Clone ID: PAT_MRT4530_99258C.1.pep
YQGSTLTVLLQVLIFLLSEFPGVCFGSMLVHAFHICSCHAGMLAVLPFLVLIDRGI

SEQ ID NO: 204142 - protein, 57 aa, Oryza sativa
  Clone ID: PAT_MRT4530_99259C.1.pep
FFTCVDMSLTHHVGAISKLICCIYSLCTICLSTVHGLLMLLNASLRYFRSLCNYALL

SEQ ID NO: 204143 - protein, 242 aa, Oryza sativa
  Clone ID: PAT_MRT4530_9925C.1.pep
MGRGEGKGHHHGAPRQPCAHPRTVGEKRKEDAGHGAVARGPPAAATLLRVAARGRFAVDRAHGGGSRKRTAEIDPFKTNGRDRSVHDRLTGEGDDDVSDDVTTGGDGSAARQLGRRTLTGERRRGGANGRHQRVERDAANSPVTKGAAEDQWTATATRKKRRRRSDRRRRWCSGGLRRRQRGRRGRRRDGDHDGGLPERRRRLERRRRAAEATAATAALEHTALGRYGRREAKAKVAAGIEL

SEQ ID NO: 204144 - protein, 372 aa, Oryza sativa
  Clone ID: PAT_MRT4530_99260C.1.pep
MAPNPVGHAPLCCRLVQGNFETFPQQDLVPLTAQEVHSKCITFGRAENLPFIPLATSALVSQHTGSSSVNVTPLQEILTSPSQISNVNTESIGVLQGLPASSIVLDRPTDDGYNWRKYGQKAVKGGEYPKSYYKCTHLNCLVRKNVEHSADGRIVQIIYRGQHTHERPSKRRFKDCGGISDDLDDFSGTTGTSVRSQPDYDDYCRKPIIPSGTMVAPLVKKIEDGDDQLSGSSDNQDEHDDEVRTSDGASGDASANERNVPAPGQKIIVSTTSEIDLLDDGYRWRKYGQKVVKGNPYPRSYYKCTYLGCDVKKQVERSVEEPNAVITTYEGKHIHDVPAARNKSHVVANASLLQNTKSNTYCTEQSYTTITC

SEQ ID NO: 204145 - protein, 87 aa, Oryza sativa
  Clone ID: PAT_MRT4530_99261C.1.pep
ATFTPTNSIPLKRVNFTNNMMHTNRAQSHVQLTCLARVWSTVEFRTGTCSAYQLSLIVQSYSELGVHHGHSADSCVHIVSPLTNSTP

SEQ ID NO: 204146 - protein, 115 aa, Oryza sativa
  unsure (1)..(115): unsure at all Xaa locations
  Clone ID: PAT_MRT4530_99262C.1.pep
GELALYATYQVLAWVRVGGQXGRQAAEHINVAIAVDSQWLNGGQVLALDEIGRSFRVESKPASRVMLYVXGPDPGVDLMVAVGYFSQTDTAKPKHLPTLHRGGGHRRGVRAPRRH

SEQ ID NO: 204147 - protein, 571 aa, Oryza sativa
  Clone ID: PAT_MRT4530_99263C.1.pep
MRSSMSSWPKSSARPGSSWLRLQAAAAAVSPSSQAATVSALYFAAGAAFLLLAAWFIASYVSHGLLLPPSHREAAPPLPLLSLEMASGTVPALPLLLAHNSHMFAGGERAAAAVALLLLSPGENQMVRVSAQPTKTRCAAGVVDTCGDVGVPYLFGIDGGSCSFLPGFNLTCDRTKQPHRLFLGDGSHLQVTEISLANYTVRVLNGVGTVNFTFAGHNDSTAKWAGVSVGQDDGPYIVSEEHNQLVVTGCNIMASLLGNSGSNVIIGCSSFCSITDWWGADPIVHSGAGGACSGLGCCDVNITIGRPSYELQLRWLDWDHNYDDLLPIAVRIAERGWFDGMSTKLLRKNSRSAVPVPVVLEWAVASVHKPPTPVDVNSTCPKDPARSECRSSNSFCRNIANMYRSGYVCKCDDGYQGNPYLTGGCQGDPGGDASKHLRLCASDLVVWQLPWCGGLMDEGGGVRGKAGSGAPKLASGRGYRFVVLPLQAGGKSTSDGGCGGYQRGGYYLAKTELEEWEGSGIGDPDSELKVEDYPYMRGLGVTAKMASCGADVVQIGHAIYGRLTWMTLVHI

SEQ ID NO: 204148 - protein, 58 aa, Oryza sativa
  Clone ID: PAT_MRT4530_99264C.1.pep
THAFRLNQPRTNKREIFDQTGLTSAAKKPMPISKHLKKFHTHSNWVYTQLEPWSPYSM

SEQ ID NO: 204149 - protein, 209 aa, Oryza sativa
  Clone ID: PAT_MRT4530_99265C.1.pep
MNGAAAGRAAARSRRGASLVVIFFRRIVVERPAERRRRAAGGGRSRGAVDGATTGGGQRGESTAREEASSSGWSAGKEVAQRTPVDGREGEERGSAAGGCRRCVGVNGWWRWPEEEEAEEEVAGERGLHAVGRSARDAQQNGAAPPRSVAERRLPPRPVAERRLPPCPVAASGPSSHPAAARRLPPRPTVARRSAHRPLLRRRSPFSDM

SEQ ID NO: 204150 - protein, 148 aa, Oryza sativa
  Clone ID: PAT_MRT4530_99266C.1.pep
PQSPRSSRIGGPTPPPKRIRGTGAGESHPHGESTTPIQVTSRRQIHAICTIIPLSFLSLCCSSDPTADREGAFPLYLERKRVLITATERIRRRKAVVGGEEIDLQGTPAAAGRSPTRCWPALRGGGGADLGFGRWKEERGGRESRTTL

SEQ ID NO: 204151 - protein, 82 aa, Oryza sativa
  Clone ID: PAT_MRT4530_99267C.1.pep
IKNVHHVLTKKHESWEPKEANKVCALMAIPTWLYHSIKISTTKAKIARWMVATKFLRSGRHERSTEGHLESATTKWLLAQNQ

SEQ ID NO: 204152 - protein, 405 aa, Oryza sativa
  unsure (1)..(405): unsure at all Xaa locations
  Clone ID: PAT_MRT4530_99268C.1.pep
KKGIIWRVGNGQSIRMWRDPWIPRDHSRRPVTMRGNCRLKWVSDLIGQDGTWXVAQIRRCFLNIDTELILSICLSPRQEEDFLAWHPDKSGRFSVRSAYNLACRLANTEGSSSSFALHSRKSWDLIWKCKLPQKIKIFAWKVASNCLATMDNKRKRKLVNSDICIICNREVENSVHALFKCPRASALLSDMVQSGNLSLVLVNFQFGNYWLFDCLEYIPTEEHEMFLLTLWRNWYVCNEITHXNKPPPLLEVSKRFLESYIATLFQIXADLEKGKTVVSRSVISAIRRRGPDGPPAASTRLHXEKPRLGWMKLNVDGSFDADRGKGGISMILRDNSGSTVFAACKSLDSCKNALEAEIRACMEGLILALQWTMRPILIETDCVSLVNLLKEGNRDLSEVVISFHS

SEQ ID NO: 204153 - protein, 167 aa, Oryza sativa
  Clone ID: PAT_MRT4530_99269C.1.pep
MKGKSYRGNCICFGRYALQALEPTWITARQIEAGRRAMTRYARRGGKIWTLLNVADNSGARKLMCIRVIGAASNQRYARIGDVIVAVIKDAVPQMPLERSEVIRAVIVRTCKEFKCEDGIIIRYDDNAAVIIDQKGNPKGTRVFGAIAEELRELNFTKIVSLAPEVL

SEQ ID NO: 204154 - protein, 676 aa, Oryza sativa
  Clone ID: PAT_MRT4530_9926C.1.pep
MSPAVRTKRPPPQPLPRRPPPPKPSAESKPAKARAPATSLLESLKSFKSRLAAGPPLAPTPKSFKSYAETCASILRLCSAAAAASGTAAASSNLPLVLSIHAHALVSGLTADGSVASHLLTAYAAFARAADRDGAFRDCVSVVGAASPFAYDFMVREHVKAGDIVSARRLFDGMPERSVVSYTTMVDALMKRGSVRDAVELYRQCPLCSVPFFTAMIAGFVLNELPKDALGVFHEMLSCGVSPNEITLVSVIKACIGADAARRMFDEMEVRDVVSWTALLDVYAELGDLEGARRVLDEMPERNEVSWGYSNNSKMVEAEELFKKMPARNVASWNSIISGYAQNRQFIDALKSFHAMLASGQSPGEITFSSVLLACASLCSLEMGKMVHAKIIKLGIKESIFVGTALSDMYAKSGDLDSSKRVFYEMPKRNDVAWTAMIQGLAENGFAEESILLFEDMISAGITPNEQTFLAILFACSHSGLVEHAMHYFEMMQACGISPKAKHYTCMVDVLARAGHLAEAEDLLLKIESKSEANSWAALLSACNIYRNKEMGERAAKRLQELDKDNTAGYVLLSNMYASCGKWKDAAEMRILMKGINLKKDGGTGRPEPRHLSGWAVHIRVYYYAYSSFPTRNHRSNRVALSSGVRSAFRWLVRRGWSHWRWRSRSSSTCCCWCSW

SEQ ID NO: 204155 - protein, 291 aa, Oryza sativa
  unsure (1)..(291): unsure at all Xaa locations
  Clone ID: PAT_MRT4530_99270C.1.pep
MASSSASSVPAPSGSVITIASASASAAANTAACGTGSPCAACKFLRRKCQPDCVFAPYFPPDNPQKFVHVHRVFGASNVTKLLNELHPYQREDAVNSLAYEADMRLRDPVYGCVAIISILQRNLRQLQQDLARAKFELSKYQQAAAAAAAASASTGTNNGPHSMAEFIGNAVPNGAQSFKLQNRFANEAKYGVYXPGLALGQHVEPTPMMSRRYXGEPIANLGGNGGFEFGYSTSNVSSIRGRWGRPRLLAVECAVGGGDGGGRGRWWRRPRLAKKPALVRLRWRGVSTCG

SEQ ID NO: 204156 - protein, 59 aa, Oryza sativa
  Clone ID: PAT_MRT4530_99271C.1.pep
GCNVKDESNDGGCMILFNVLYELESSRWFAWALYICNGRGFMVRRCFGLCLYIWNVSII

SEQ ID NO: 204157 - protein, 2006 aa, Oryza sativa
  unsure (1)..(2006): unsure at all Xaa locations
  Clone ID: PAT_MRT4530_99272C.1.pep
FIYQINWHAHTFEGELWTCTGVKQISQALCFLSTRFWHTWWDIXEVSQQFFLMAEKPPPSPASPGSVKEKMLKLGLADVNEGNVVPIDPEKFTPEQKKEFEAMLQQARDQCLNSFMQTRKGTLVQKYKIKVVADDPGTSSSKDGDGKQAPDGSAQLSNKSATDSSLGNQGDNSQGVHGVQGDGVHGVQDRVDYAVHHVLINQSGVLVKTLSNMMKSIADGSIAEHQAAGPVYLQGGVFPNYRSLITDVQPSTQAVPSVAPTSQPKALASIPLPVPSAMAPGQPVNPQLLMREQPQHGGQVANRLTQDQVAATFLPPQPIVDPIQQXRFSRHPQFSRLCNQVCNAWWSACATIFKSSCPRTLGSPRTAGWHDVMREQFGLKPKETGSLYRQPYPEWFERVPLPNRFKVPDFFKFSGQDGVSTYEHISRFLAQCGEASAVDALKVRLFRLSLSGSAFTWFSSLPYGSINSWADLEKQFHSYFYSGVHEMKLSDLTAIKQRHDEPVHEYIQRFREMRNKCFSLSLTDAQLADLAFQGTIAPIREKFSSEDFDSLSHLIQKVTLHEHRSAEVRKNSKKVNHVCPYMYGSDDDEDDSEIAAAEWVRSKKVIPCQWVKSSRKEEKYDFDITKADKIFDLLLREKQIQLPAGHTIPSAEKLGKKKYCKWHNFGSHSTNDCKVFRQQIXVAIEGGKIRFDDSRKPMKVDGNPFPVNMVHTAGQTADRARARGFPVNSAKIINKYQKKYDKQQEKHHEKYDDGMRLPSIENCPGCSDIVENSSRSYDRGNRLRQTRVSVHQRLGPVNQDHGQKDHVIRNNQWCPSGIFTKNQKRRKAKPRQEWRVKNQVPAVDDVAAVEAKRXAKGKSVVTAPVNMVFTLPAEFGIDQANVDEVEEESTKLVLSLEQAVFEKPEGTENRHLKPLYINGYVNGKPMSKMMVDGGATVNLMPYATFRKLGRNAEDLIKTNMVLKDFGGNPSETKGVLNVELTVGSKTIPTTFFVIDGKGSYSLLLGRDXIHANCCIPSTMHQCLIQWQGDKIEIVPADNQLKMENPSYYFEGVVEGSSVYTTDTVDDLDDKHGQGFMSADDLEEVDIGPEFRTKLIELLKEFRDCXSXEYYEMPGLSRSIVEHRLPIKPGVMPHQXPPRRCKADMLEPVKAEIKRLYDAGFIRPXEYVEWVSSIVPVIKKNSKGRATPKDESPLPVADQLVDXAASGHKILSFMDGNAEYNQIFMAEEDIHKITFRCPSAIGLFEWVVMTFGLKSARATYQRAMNYIYDDLIGWLVEVYIDDVVVKSKEIKDHIAYLRKVFERTRKYGLRMNPTKCAFGVSAGQFLGFLVHERGIEVTQRSVNAIKKIQPPENKTELQEMIGKINFVRRFISNLSGRLEPFTPLFRLKVDQQFTWGAEQQKALDNIKEYLSSPPVLIPPQKGIPFRLYXIGSVLIQELEGKEXVVFYLSRRLLHAETRYSPVEKLCLCLYFSCTRLRHYLLSNECTVVCKADVVKYMLSAPILKGRVGKWIFFLTEFDLRYESPKAIKGQAIADFIVEHRDDSIGSVEIVPWTLFFDGSVCSHGCGIGLVIISPRGACFEFAYTIKPYATNNQAEYEAVLKGLQLLKEVEADTIEIMGDSLLVISQLAGEHECKNDTLMVYNEKCQELMKEFRLVTLKQFSREQNIEANDLAQGASGYKPMIKDVKVEIAAMTADDWRYDVHQYLCNPSQSASRKLRYKGLKYTLLDGELYYRTIDXLLKCLGADQAKDAIGEVHEGICGTHQSAHKMKWLLRRAGYFWPTMLEDCFRYYRGCQDCQKFGAIQRAPASAMNPIIKPWPFRGWGIDMIGMINPPSSKGHKFILVATDYFTKWVEAIPLKKVDSGDAIQFVQEHIIYRFGIPQTITTDQGSIFVSDEFVQFADSMGIKLLNSSPYYAQANGQAEASNKSLIKLIKRKISDYPRQWHTRLAEALWSYRMACHGSIQVPPCKFVYGHEAVLRWEVRIGSRRTELPNGKYLKKYYPSVWVNA

SEQ ID NO: 204158 - protein, 1623 aa, Oryza sativa
  Clone ID: PAT_MRT4530_99273C.1.pep
MTWLGWLLRQGWLRSTPLRRLRRATAWQRDMLRQKSVVKTCGILEFVRDNSRVRIKSTGTLTHLKASPGTVKEKIQKLGLTDVNEGNVVPIEPEKFTPDQKKDFDAMMQQARDQFLNSFMQTRKGTLVQKYKVKVVADDPGTSSSKGEHGKQAPDGSAQPSDKGATDGSLGGQGDNSQDRVDYAVHHALINQSGVLVNTLSNMMKSIADGSIGEHQAAGPVYLQGGVFPNYRPLITEAQPSIQAVPPIAPSAQPTAPASTPLSAPSALAPGQLVNPRLLIREQPQHSGQVANRLTQDQVAATFLPPQPTVDPIQQQPIQQTPPIQQVVQPIQQQSQGAVQQRLWADVIADVMREQFGLKPKETGNLYRQPYPECWADLEKQFHSYFYSGVHEMKLSDLTVIKQWHDEPVHEYIQRFREMRNKCFSLSLTDAQLADLAFQGMIAPIKEKFSSEDFDSLSYLIQKVTLHEHRSVEARKSSKKVNHVCPYIYGSDDDDEDDSEIAAAEWVRSKKVISCQWVKSSGKEERYDFDITKADKIFDLLLREKQIQFPADHIIPSAEELGKKRYCKWHNSGSHMTNDCKVFRQQIQEAIEEGKIKFDDSKRPMKVDGNPFPVNMVHTAGQTADRGRVPAADEAAADEAKRLAKGKSVVTASINMVFTLPAEFGSKQADVDEVEEESAKLILSPEQAVFEKPEGAENRHLKPLYINDYVNGKPMSKMMVDGGAAVNLMPYATFRKLGRNTKDLIKTNMVLKDFGGNPSETKGVLNVELTVGSKTIPTTFFVIDGKGSYSLLLGKDWIHANCCIPSTMHQCLIQWQGDRIEIVPADSQLKMESPNCYFEGVVEGSGVYVKDTVDDLDDKQGQGFMSADDLEEIDIGPGDRPRPTFISKNLSAEFRTKLIELLKEFRDCFAWEYYEMPGLSRSIVEHRLPIKPGVRPHQQPPRRCKADMLEPVKAEIKRLYDAGFIRPCRYAEWVSSIVHVIKKNSKVRVCIDFRDLNKATPKDEYPMPIADQLVDATSGNKILSFMDGNARYNQIFMAEEDIHKTAFRFLGAIGLFEWVVMTFGLKSAGATYQRAMNYIYHDLIGWLVEVYIDDVVVKSKEIEDHIADLRKVFERTRKYGMKMNLTKCAFSVSAGQFLGFLVHERGIEVTQSSVNAIKKIQPPENKTELQEMISKINFVRRFISNLPGRLRHYLLSNECIVICKADVVKYMLSAPILKGRVRKWIFSLTEFNLRYESSKAIKGQAIADFIVEHRDDSIGSVEMVPWTLFFDGSVCTHGCGIGLVIISPRGACFEFAYTIKPYATNNQAEYEAVLKGLQLLKEVEADAIEIMGDSLLVISQLAGEYECKNDTLMVYNEKCQELMKEFRLVTLKHVSREQNIEANDLAQGASGYKPMIKDVKVKIAAMTADDWSVGIKLLNSSPYYAQANGQAKASNKSLIKLIKRKISDYPRQWHTRLAEALWSYRMACHGSIQVPPYKLVYGHEVVLPWEVRIGSRRIELQDDLTADEYDNLMADEREDLVQLRLRALAKVTKDKERVAMHYNKKVVPKTFSEGELVWKLILPIGTRDNKFGKWSPNWEGPFQIYKVVSKGAYMLQGLDGEVYGRALNGKYLKKYFPSVWVNA

SEQ ID NO: 204159 - protein, 323 aa, Oryza sativa
  Clone ID: PAT_MRT4530_99274C.1.pep
MREQFGLKPKETRSLYRQPYPEWFERVPLPNRFKVLDFSKFSGQDAIKQRYDEPVHEYIQRFREMRNKCFSLSLTDAQLADLAFQGMIAPIREKFSSEDFDSLSHLIQKKDDSEIAAAEWVRSKKVISCQWVKSPRKEKKYDFNITKADKIFDLLLREKQIQLPAGHIIPSAEELGKKRYCKWHNSGSHSTNDCKVFRQQIQVAIEGGKIRFDDSKKPMKVDDNPFPVNMVHTAGQIADRVRAKGFQVNSAKIINKYQRKYDKQQEKHYEEYDDGFDPHWGCEFFRLCWNEGMRLCHAQKFTSNFRTYLCIKSSSRNQPRYTN

SEQ ID NO: 204160 - protein, 303 aa, Oryza sativa
  Clone ID: PAT_MRT4530_99275C.1.pep
MDLWERARAFAGEAAKRSQELSAEAAKRSSALVSETAKKSKEIFSETATKSREIAAEATKQADLLAGQIKRLSTDLPVPSIPAIPPIPTAVAPEPDAAELERYGITEDLREFVKGMTISTFRDFPLQDEPEMSDVPTVSNVRQDLNEWQARHATLVLSAVKEISKFRYELCPRYMKERKFWRVYFLLVNNYTSLYENKYFEELKVKSEEEKMDAKKEVTETSQATTAEHKDMKVQSKTSTSTNPEHDLDVFLLGDLGSDDEGPDGDDDGLDDDFDKIDGTSGLESDDDDDKEKAAGKAESAKE

SEQ ID NO: 204161 - protein, 254 aa, Oryza sativa
  unsure (1)..(254): unsure at all Xaa locations
  Clone ID: PAT_MRT4530_99276C.1.pep
SREQNIEANDLAQGASGYKPMIKDVKIEIAAMTADDWRYDVHQYLQNPSQSASRKLRYKALKYTLLDDELYYRTIDGVLLKCLSADQAKVAIGGVHEGICGTHQSAHKMKWLLRRAGYFWPTMLEDCFRYYKGCQDCQKFGAIQRAPASAMNPIIKPWPFRGWGIDMIGMINPPSSKGHKFILVATDYFTKWVEVIPLKKVDSGDAIQFVQEYIIYRFGIPQIITTDQGSIFISDEFVQFSDSMGXKWLNSSPY

SEQ ID NO: 204162 - protein, 1529 aa, Oryza sativa
  unsure (1)..(1529): unsure at all Xaa locations
  Clone ID: PAT_MRT4530_99277C.1.pep
MAEKQPPPPSSPGSVKGKALKQGLTDIIDDNVMPIDPEKFTPEQKAEFEATLQQARDQFLNSFMQTRKGTLVQKYKIKVVADSPGTGYSKDGEVKQAPDGSAQPSTKGGTDGSPSDQGDNSQGVHGVQGDGAQEPQGGNLDQNNELAQDFFNNFQDRVDYAVHHALINQEQFGLKPKETGSLYRQPYLEWFERVPLPNRFKVPDFSKFLGQEGVSTYEHISRFLAQCGEASAVDALKVRLFRLSLSGSAFTWFSSLPYGSINSWVDLEKQFHSYFYSGVHEMKLSDLTAIKQRHDEPVHEYIQRFREMRNKCFSLSLTDAQLADLAFQGMIPPIREKFSSEDFDSLSHLIQKITLHEHRSAEVRRSSKKVNHVCPYMYGSDDEEDDSEIAAAEWVRSKKVIPCQWVKSLGKEEKYDFVXPRLTRFLIYYSEKSKFSFLLVFRQQIQVAIEGGKIRFDDSKKPMKVDGNPFPVNMVHTAGQAADRVRAKGFQVNSARIINKYQRKYDKQQEKHYEEYDDGFDPHWGCEFFRFCWNEGMRLPSIENCPRCSDIIESSSRSYSRADEAKRLAKGKSVIAAPINMVFTLPAEFGIDQADVDEVEEGSAKLVLSPEQTVFEKPEGTENRHLKPLYVNSYVNGKPMSKMMVNGGTAVNLMPYATFRKLGRSAEDLIKTNMVLKDFGGNPSETRGVLNVELTVGSNTIPTTFFVIDGKSSYSLLLGRDWIHANCCIPSIMHQCLIQWQGNKIEIVPADSQSKMENPSYYFEGVVEGSNVYAKDTVDDLDDKQDQGFMSADELEEIDIGPGDWPRPTFISKNLFPEFRTKLIELLKEFRDCFVWEYYEMPGLSRSIVEHRLPIKPGVRPRQQPPRRCKADMLEPVKAKIKRLYDAGFIRPYRYAEWVSSIVPVIKKNGKVRVCIDFRDLNKATPKDKYPMPVADWLVDAASGNKILSFMDGNAGYNQIFMADEDIHKTAFRCPGAIGLFEWVVMTFGLKSAGATYQRAMNYIYHDLIGWLVEVYIDDVVVKSKEVKDHIAELRKVFERTRKYGLKMNPTKFIISPRGACFEFAYTIKPYATNNQAEYEAVLKGLQLLKEVEVDTIEIMGDSLLCLELMKEFRLVTLKHVSREQNLEANDLAQGASWYKPMIKDVKVEIAAMSADDWRYDVHQYLSNPSQSASRKLRYKALKYTLLDDELYYRTIDGVLLKCLSADQAKVAIGEVHEGICGTHQSAHKMKWLLRCTGYFWLTMLEDCFRYYKGCQDCQKFGAIQRAPASAMNPIIKPWPFRGWGIDMIGMTNPPSSKGHKFILVATDYFTKWVEAIPLKKVDSGYAIPFVQEHIIYRFGLPQTITTDQDSIFVSDEFVQFADSVGIKLLNSSPYYAQANGQAEASNKSLIKLIKRKISDYPRQWHTRLAEALWSYRMACHGSIQVPPYKLVYGHEAVLPWEVRIGSRRTELQNDLTADEYYNLMADEREDLVQSQLRALTKVTKDKERVAWHYNKKVVPKDFSEGELVWKLILPIGTRDSKFGKWSPN

SEQ ID NO: 204163 - protein, 103 aa, Oryza sativa
  Clone ID: PAT_MRT4530_99278C.1.pep
MYQHCDTCPESLGQNRKINYLMTNANAEARQIKMREATILASLYDPSTVTAYSLGIDETIYPSLVISCMTICSINQLLRDSSAIRKEGKRDKSKLQWHACVAF

SEQ ID NO: 204164 - protein, 1288 aa, Oryza sativa
  Clone ID: PAT_MRT4530_99279C.1.pep
MAEKQLPPPSSPGSVKEKMLKLGLTDVNEGNVVPVDPEKFTPEQKKEFEAMLQQARDQFLNSFMQTRKGTLVQKYKIKVVVDDPRTSSSKDRDGKQAPDGSAQPSIKGATDGSLGNQGDNSQGVHGVQGDGVHGVQGDGAQGLQGGNLNSDVAQDFFNNFQDRIDYAVRHALINQSGVSAAADSTDTSNSAGCKTNPATGRATSSANTTKAAASAADPIDSVKTANRSADSAPGVNKRIGRPQGAAQQRPWADVIADVMREQFGLKPKETGSLYPQPYPEWFERVPLPNRFKVPDSSKFSGQDGVSTYEHISRFLAQCGEASAVDALKVSWADLEMQFHSYFYSGVHEMKLSYLTAIKQRHDEPMHKYIQRFRKMRKKCFSLSLTDAQLADLAFQGMIAPIREKFSSKDFDSLSHLIQKVTLHEHRSMEVRKSSRKVNHVCPYMYGSDDEEDDSEIAAAEWVRSKKVFRQQIQVAIEGGKIRFDDSKKPMKVDAGQTADRVHAKGFQVNSAKIINKYQRKYNKQQEKHYEEYDDGFDPHWGLISLGAVSVHQRLGPVNQDRGQEDENQKKRVQRLRNREHFQEVEQEINHRLRKAKPRQEWRVKNQVPVADDVAADEAKRLAKGKSVVTAPINMAVFEKPEGTENQHLKPLYINGYVNGKPMSKMMVDGGAVVNLMPYATFRKMGRNAEDLIKINMVLKDFGGNPSETKGVLNVELTVGSKTIPTTFFVIDGKGSYSLLLGRDWIHANCCIPLTMHQCLIQWQGDKIEIVPADSQLKMENPSYYFEGIVEGSDVYTKDTVDDLDDKQGQGFMSADDLEEIDIGPGDRPRPTFISKNLSPEFRTKLIEFLKEFRDCFAWEYYEMPGLSRSIVEHRLPIKPGVRPRQQPPRRCKADMLEPVKADIKRLYDAGFIRPCRYAEWVSSIVSVIKKNGKVRACIDFRDLNKATPKDEYPMPVADQLVDAASGHKILSFMDGNAGYNQIFMAEDDIHKTAFRCPGAIGLFEWVVMTFGLKSAGATYQKAMNYIYHDLIGWLVEVYIDDVVVKSKEIEDHIADLRKIFERTRKYGLKMNPTKCAFGVSAGQFLGFLVHERGIEKGIPFRLYLSAADVVRYMLSAPILKGRVGKWIFSLTEFDLRYESPKAIKGQAIANFIVEHRDDSIASVEIVPWTLFFDGSVCTHGCGIGLVIISRRSACFEFAYTIKLYATNNQAEYEAVLKGLQLLKEVEADAIEIMGDSLLVISQLAGEYECKNDTLMVYNEKCQELMKEFRLVTLKHVSREQNIEANDLA

SEQ ID NO: 204165 - protein, 66 aa, Oryza sativa
  Clone ID: PAT_MRT4530_9927C.1.pep
IVPMEIMSIIPANCRISAIKEISYICYLFMQMWSSAALKHVCRPPYGVAACHLGYQNGCDIHQWLS

SEQ ID NO: 204166 - protein, 202 aa, Oryza sativa
  Clone ID: PAT_MRT4530_99280C.1.pep
MAVSSPTSAPEKKRKWLLSNRKVIDKYLREARAILATAPEAGGGDAVAALGLVDAALELSPRMESALELRGRALLSLRRYRDVAEMLRDYIPSCAKTCSGDDTLSSSTSSSLSSSGSGDLGTISRAKLLSPDRHRSDAAAEPGAAVARSFRCFDISELKRRVLASLSKNPNTDTQWRYLVLGQACFHLGLIEDAMVLLQTGR

SEQ ID NO: 204167 - protein, 54 aa, Oryza sativa
  Clone ID: PAT_MRT4530_99281C.1.pep
MPNTSGREGGDFAGDLEDVCRVGARVRTSEEMGVEAEKTGSAPPPARSRNSQGE

SEQ ID NO: 204168 - protein, 883 aa, Oryza sativa
  unsure (1)..(883): unsure at all Xaa locations
  Clone ID: PAT_MRT4530_99282C.1.pep
KLQNQSLSSSADSFAPASAGVDAYSPYDMHRLVFSDLTAIKQRHDEPVHEYIQRFREMRNKCFSLSLTDAQLADLAFQGMIAPIREKFSSEDFDSLSHLIQKVTLHEHRSAETRKSSKKVNHVCPYMYGSDDDEDDSEIATAEWVRIKKVIPCQWVKVWKGREYDFDITKADNIFDLLLREKQIQLPAGHTIPSSKELGKKKYCKWHNSGSHSTNDCKVFRQQIQVAIEGGKIKFDDSKSXMRVDGNPFPVNIVHTVGRIADTGCMRGYQVSSARIINKYQRKYDKQQERHHEEDNEGMRLPSIEDCPGCSDVARGSSRLYDGGNWLKQTRVPVHQRLGPVNQRGDSEYDENKKTQWCPASIFTKNQKRRKAKPRQEWRVKNQAPVADDVAADEAKRLAKGKSVVTAPVNMVFTLPAEFGIDQADVDEVEEESAKLVLSPEQAVFEKSEGTENRHLKPLYINGYVNGKPMSKMMVDGGAAVNLMPYATFRKLGRNAEDLIKTNMVLKDFGSNPXETKGVLNVELTVGSKTIPTTFFVIDGKGSYSLLLGRDWIHANCCIPSTMHQCLIXWQGDRIEIVPADSQLKMENPSYYFEGVVEGSSVYTKDTVDDLDDKQXQGFMSADDLEEIDIGPGDRPRPTFISKNLSPEFRTKLIELLXEFRDCFAXKYYEMPGLSRSIVEHRLPIKPGDRLHQQPSRRCKADMLEPFKAEIKRLYDAGFIRPCRYAEWVSNLNKATPKDEYPMPVADQLVDATSGNKILSFMDGNAGYNQIFMAEEDIHKTAFRCPGAIGLFEWVVMTFGLKSAGATYQRAMNYIYHDLIGWLVEVYIDDVVVKSKEIKDHIADLRKVFERTRKYGLKMNPTKCAFGVSAGQFLGFLVHERGI

SEQ ID NO: 204169 - protein, 1529 aa, Oryza sativa
  unsure (1)..(1529): unsure at all Xaa locations
  Clone ID: PAT_MRT4530_99283C.1.pep
MKLSDLTAIKQRHDEPVHEYIQRIREMRNKCFSLSLTDAQLADLAFQGMIPPIRKKFSSGDFDSLSHLVXKVTLHEQRFAEARRSSKRVNHVCPYMYGSDDDDDDSEIAAAEWVRSKNVIPCQWVKNSGKEEKYDFDITKADKIFDLLLREKQIQLPAGHVIPSAEELGKRRYCKWHNSRSHSTNDCKVFRQQIQVAIEGGKIKFDDSKKPMKVDGNPFPVNMVHTVGRTADVGQARGFRMNSAKIINKYQRKYDKQQDRHYEEDNDGMRLXSIEDCPGCSDITXSSSRSYNRGNRLKQARIPVHQRLGPVNQNDYLEEDENAKTQWCPSGIFTKNQKRRKAKPRKEWRVKNQVLGADDIAADEAKRLAKGKSILTAPINMVFTLPAEFGIDXADVDELEEESAKLVLSPERAVFEKPEGIENRHLKPLYINGYVNGKPMSKMMVDGGAAVNLMPYTTFRKLGRTTEDLIKTNMVLKDFGGNPSGTKGVLNVEXLTIGSKTIPTTFFVIDGKGSYSLLLGRDWIHANCCIPSTMHQCLIQWQGDKVEIVPADSXLKMKNPSYYFEGVVEGSSVYAKDTVDDLDDKQGQGFMSADDLEEVDIGPGDRPRPTFISKNLSSEFRTKLMELLKEFRDCFGWEYYEMPGLSRSIVEHRLPLKPGIRPHQQPPRRCKADMLEPVKAEIKRLYDDGFIRPCRYAKWVSNLNKATPKDEYPXQLVDAASGHKILSFMDGNAGYNQIFMAEEDIHKTAFRCPGAIGLFEWVVMTFGLKSAGATYXRAMNYIYHDLIGWLVEVYIDDVVVKSREIEDHIADLRKVFERTRKYGLKMNPTKWAFGVSAGQFLGFLFHERGIEIPQRSINAIKKIKPPENKTELXEMIGKINFVRRFISNLSGRLEPFTPLLRLRADQQFTWGAEXQKALDNIKEYLSSPPVLIPPQKGIPFRLYLSAGDKSIGSVLIQELEGKERVVFYLSRRLLDAETRYSPVEKLCLCLYFSCTKLRHYLLSNECTMVCKADVIKYMLSAPILKGRVGKWIFSLTEFDLQHESPKAIKGQDVADFIVGHHDDSIGLVDIMPWVLFFDGSVCSHGYGIGLVIIAPWGASFEFAYAIKHRVTNNQAEYEAVLKGLQLLQEVAADAIEIMGDSLLVISQLAGEYECKDDTLMVYYEKFRTLISESRLVNLKHISREQNIEXNSLAQGALGYKPMTKDIEIEIATIIADDWRYDVFQYLQNPSQSASWKLHYKALKYTLLDDDLYYRTIDGVLLKCLSVDQAKVAIGEVHEGICGTHQSAHKMKWLLRRAGYFWLTMLEDRFRYYKSCQDCQKFGAIQRAPASAMNPIIKPWPFKGWGIDMIGMINPPSSKRHKFILVATDYSTKWVEAIPLKKVDSGDAIQFVQEHIIYRFGIPQTITTDQGSIFVSDEFVQFADSMGIKLLNSSPYYAQANGQAEASNKSLIKLIKMKISDYPRQWHTRLAEALWSYRMACHGLIQVPPYKLVYGHEAVLPWEVRIGSRRTELLNGKYLKKYYPSVWVNA

SEQ ID NO: 204170 - protein, 1193 aa, Oryza sativa
  unsure (1)..(1193): unsure at all Xaa locations
  Clone ID: PAT_MRT4530_99284C.1.pep
MRVDGNPFPVNIVHTVGRIADTGCMRGYQVSSARIINKYQRKYDKQQERHHEEDNGGFDPHWGCEFFRFCRNEGMRLPSIEDCPGCSDVARGSSRLYDGGNWLKQTRVPVHQRLGPVNQRGDSEYDENKKTQWCPASIFTKNQKRRVQRLRSRERFQEVEQEINHRLKKAKPRQEWRVKNQAPVADDVAADEAKRLAKGKSVVTAPVNMVFTLPAEFGIDQADVDEVEEESAKLVLSPEQAVFEKSEGTENRHLKPLYINGYVNGKPMSKMMVDGGAAVNLMPYATFRKLGRNAEDLIKTNMVLKDFXWQGDRIEIVPADXLKMENPSYYFEGVVEGSSVYTKDTVDDLDDKQEHRLPIKPGDRLHQQPSRRCKADMLEPFKAEIKRLYDAGFIRPCRYAEWVSSIVPVIKKNGKVRVCIDFRDLNKATPKDEYPMPVADQLVDATSGNKILSFMDGNAGYNQIFMAEEDIHKTAFRCPGAIGLFEWVVMTFGLKSAGATYQRAMNYIYHDLIGWLVEVYIDDVVVKSKEIKDHIADLRKVFERTRKYGLKMNPTKCAFGVSAGQFLGFLVHERGIEITQRSINAIKNIKPPENKTELQEMIGKINFVRRFISNLSRKLEPFTPLLRLKADQQFTWGAEQQKALDNIKGYMSSPPVLIPPQKGIPFRLYLSAAEYEAVLKGLQLLKQVEADAIEIMGDSLLVISQLAGEYECKNDTLIVYNEKCQELMKEFRLVTLKHVSREQNIEANDLAQGASGYKPMIKDVKVEIAAITADDWRYDVHQYLHNPSQSASRKLRYKALKYTLLDDELYYQTIDGVLLKCLSADQAKVAIGEVHEGICGIHQSAHKMKWLLRRAGYFWPTMLEDCFRYYKGCQDCQKFGAIQRAPASAMNPIIKPWPFRGWGIDMIGMINPPSSKGHKFILVATDYFTKWVEAIPLKKVDSRNAIQFVQEHIIYRFGIPQTITTDQGSIFVSNEFVQFADSVGIKLLNSSPYYAQANGQAEASNKSLIKLIKRKISDYPRQWHTRLAEALWSYRMACHGSIQVPPYKRVYGHEAVLPWEVRIGSRSIELQDGLTADEYYNLMADEREDLVQLRLRALAKVTKDKERVARHYNKKVMPKDFSEGELVWKLILPIGTRDNKFGKWSPNWEGPFQIYKAVSKGAYMLQGLDGKVYGRALNGKYLKKYYPSVWVDA

SEQ ID NO: 204171 - protein, 719 aa, Oryza sativa
  Clone ID: PAT_MRT4530_99285C.1.pep
MSNEVNHVGKAPMFSDTNYSTWKIKMSTHLKATSFHIWSIVDVGFVITGSPLMEVDHRNLLLNAQAMNALFNSLSQDEFDRVSNLETTYEIWNKLSEIHEGTSEYKDAKLHFLKIQYETFAMLPDESVNDMYGRLNVIVNDLKGLGAIYTDLEVAQKMLRALPDKYKNLVTFLINSDMSRMTPASLLGKINTNDMYKLKKKEMEKASPSKKTSIALQTEVEDKGKGKVNEGKDDLDEEIALLTRRFNDLLGRRKERGRGSNTNRRRNRRPNKTLSNLRCFECGEKGYFASKCPSKGDDEDKSSKKNKSGGYKLMKKLKKEGKKIEAFIGQWDSSVESFDSQSGSDNESDDDGSSKKKNMAGVAIKEAPSLFSPFCLMPRGSTKVTSSSDSESDDDVDDISYDELVSMFEELHAYSEKEIAKYKALKKDHASLETLYEELKTSRERLTISHEKLKEAHDTLLTTTQHGAHIDLCASICDVSLVVVNNELKEQVAKLNKSLERCFKGKTTLDKILSEQQCILNKEGHGFIPKKGRFMMVALLLDMWVPLYLVVNYYTGGSHWVLDSGCTQHKTGDRKMFTTFEVGGKDQERVTFGDNSKGKVIGLGKDAITNDLSITNVYLVEPLNFNLFSVAQICDLGLSCTFNPQDVIVSSLHDKSCIFKDFRYKYLYLVDFNSSEANLKACLVAKISLGWLWHRRLAHVGMHQLSKLLKHDLVVGLKM

SEQ ID NO: 204172 - protein, 2012 aa, Oryza sativa
  unsure (1)..(2012): unsure at all Xaa locations
  Clone ID: PAT_MRT4530_99286C.1.pep
LQDQIKWHASIPEGVFWTCTGVKQISQASCFTSTCFWHARWDRLEVNKQFXLMAEKPPPSPSSASPSSVKEKLHKLGLSEVDEGNIMTITLENLTPDQKKDFEAMMQQARDQFLNSFMLTRKGTLVQKYKINVVADDPGTSSSKDEEGKQASDGSAQPSDKGATDGSPANQGDNSQRVHRVQGDGSQGVQDQVDYAVHHALINQSGILTNTLANMVKSMVDGSIAEYQATGPVYLLGGVFPNYRPLITDNQQVVQSIPLNAPSAQPTAPVSAPAPAPPPSAPDQIINPRLLVREQPQHAGQNVNRLTQDQVPSMFLPXHTIDPTQHSRFSKHPQSNSLCNQVCNTWWSACAACCKSSCSRALGSSRTTRWHNVMKEQFGLRPKDAGNLYRQPYPEWFERVPLPNRFKVPDFSKFSGQDSTSTYEHSSRFFAXCGEASAVDALKVRLFRLSLSGSAFTWFSSLPYGSINSWVDLEKQFHSYFYSGVHEMKLSDLTSIKQRHDEPMHEYIQRFREMRNKCYSLSLTDAQLADLAFQGMIAPIKEKFSSEDFESLSHLTQKVTLHEQRFAEARKNSRKVNHVCPYIYGSDDEDDDSEIVAAEWVRSKKVIPCQWVKNTGKEERYDFDITKADKIFDLLLREKQIQLPVGHTIPSAEELGKKRYCKWHNSGSHTTNDCKVFRQQIQAAIEGGKIKFDDSKRPMKVDGNPFPVNMVHSAGRIADVGHARGFQVNSAKIINKYQRKYDKXXEKHYEEDDDGMRLPSIEDCPGCSDVAESSSRSYSRGNRLRQTRLPVHQRLGPVNXDHSQEDNENRKTQWCPSGIFTKNEKRRKTKPKQDRRLKNQVPVADEATADEAKRLAKGKSVVTASVNMVFTLPAEFGIKQADIDEVEEELAKLILSPEQAVFEKSEGTKNQHLKPLYINDYVNGKPISKMMVDGGATVNLMPYTTFRKLGRNAEDLIKTXMVLKDFGGNPSETKGVLNVELTVGNKTIPTTFFVINGKGSYNLLLGRDWIHANCCILSTMHQCLIQWQGDKIEIVPADSQFKMDKPSYYFEGVVEGSDVYNEDTVDDLDDKQGQGFMSADDLEEIDIGLEFRTKLIELLKEFRDCFAWEYYEMSGLSRSIVEHRLPIKPGIRPHQQPPRRCKAHMLEPVKAEIKRLYDAGFSRPCRYAXWVSSIVPVIKKNDLNKATPKDEYPMPVADQLVDAASGHKILSFMDGNAGYNQIFMAEEDIHKTAFRCPGAIGLFEWVVMTFGMKSAGATYQRAMNYIYHNLIGWLVEDYIDDVVVKSKEIEDHIADLRXFERTRKYGLKMNPTKCAFGVSAGQFLGFLVHERGIEVTQRSVNAIKKIQPPENKTELQEMIGKINFVRRFISNLSERLEPFTPLLRLKADQQFTWGXAEKQKGLDDIKEYLRSPPVLIPPQKGIPFRLYLSAGEKSICSVLIQELEGKERVVFYLSRWLLDAETRYSPVEKLCLCLYFSSIRLRHYLLSNECTVIFKANVVKYMLSAPILKGRVGKXIFSLTEFDLRYESPKAIKGQAIADFIVEHRDDSIGSVEIVPWTLFFDRSVCTHGCGIGLVIISPRGXCFEFAYTIKPYATNNQAEYEAVFKGLQLLKEVEADAIAIIRDSLLVISQLAGEYECKNDTLMVYNEKCQELMKEFRLVTLKHVSREXNIEANDLAQGASGYKPMIKDVKVEIAAMTADDWRYDVHQYLQNPSQSASRKLRYKALKYTLLDDELYYRMIDRVFLKCLSANQAKVAIGEVHEGICGTHQSAHKMKWLLRRAGYFWPTMLEDCFRYYKRCQDCQKFGAIQRASASAMNPIIKPWPFRGLGIDMIGMINPPSSKGHKFILVATDYFTKWVEAIPLKNVDSGDAIQFVQEHIIYRFGIPQTITTDQGSIFVSDEFVQFADSMGIKLLNSSPYYAXANGQAEASNKSLIKLIKRKISDYPRQWHTRLAEALWSYRMACHGSIQVPAYKLVYGHEAVLPWEVRIGSRRTELQNSLTADEYYNLMADE

SEQ ID NO: 204173 - protein, 45 aa, Oryza sativa
  Clone ID: PAT_MRT4530_99287C.1.pep
TRHFLARGKLTGDPDGWTKKELHLFHPSHAIDVAIQNNGLETGGQ

SEQ ID NO: 204174 - protein, 450 aa, Oryza sativa
  Clone ID: PAT_MRT4530_99288C.1.pep
MSNRSKFWRLAALVPEVQCPDQPISPRQKFKYTAIVLFIFVTASQVLLYGIQHQPRTIEPDPLHWLHLILASSRSTLLSHGIVAILVPEVLVKIWVYLKIITLDTSAPETGVLMNRAQRLLGILVAILGAVNFYVRSQHFTVNTVLIMLQILCSDIIVIYLDDVLRKGYGLLSGISLFTATNICVNILWKAFSPMSVMYPEQSPEFEGAVIAWVHLLMTRTDKLSAMSKAFYRQNLPNIINFLATCLFVPLAIFFQGFYIVLPVRTRRNFQAYCHIKLSHFLYGPVVLHRLLLPLPYVASKVLYKKYSGNTLVNLLGKWDGLNHFGQSIPVGGIVYYLRTPPILADLHRDPFHAFIYVAFVLISCVFISMGLMMQEERRLRLAQPDSIHANEIRRHVMRAACVGGFCAGVLIIFADLIGVFCSGTGIMLAVTASYPYVDGRASEVGSFGF

SEQ ID NO: 204175 - protein, 44 aa, Oryza sativa
  Clone ID: PAT_MRT4530_99289C.1.pep
LLLYLTTVQPDKTMLQKGRGSSKEQDIITYACGQLFYTSCTALH

SEQ ID NO: 204176 - protein, 264 aa, Oryza sativa
  unsure (1)..(264): unsure at all Xaa locations
  Clone ID: PAT_MRT4530_9928C.1.pep
SPPYKTRHGLPSDPRGLISATSQSGKGGLLRQRARVSVDWAHGXGSRERTAEIDPSKTDGRDRSVYDRLTEEGDDDVSDDVTTGGDGSAARACMLAGERRHGGANGRHQRVERDATNSPVTKRAAEDQRTATATRRKRRQTSGRRRRRYSGGLRRRRRSGRERRXLGDHDGGLPERXRRPRRRRRTAGATAATAALGCTALELFRRREAKARVAAGREELGGPFKGARRRRRRPTAAGDEKESXGSEERDESDSNSNPTISKKN

SEQ ID NO: 204177 - protein, 212 aa, Oryza sativa
  unsure (1)..(212): unsure at all Xaa locations
  Clone ID: PAT_MRT4530_99290C.1.pep
GLRSQPSLWTPFFTPTPFATVPIRYGIKGWGRKLVKSKLGGGPSKPTXPLDTFRHTHTLHHSTNKTPFATPTPFAIVPIRYGVKGWGXKLVKSKLGGFEANXPLDTFRHTHTLRHSTNKVQQGTASRAGGENELSPEVKMGAAKPTXPLDTFRHTHTLRHSTNKNATSQKRKSKAEKSTNLFVNPQMGAERMSLGEIPAKAIGKRGRKKYKS

SEQ ID NO: 204178 - protein, 162 aa, Oryza sativa
  Clone ID: PAT_MRT4530_99291C.1.pep
MAMVPADADAAAKPPPDVEKPDYSSQNGAPNSAAAAAGGGGGGVVDSVVARWRREDMLDKSPLALHAAAAAFAFVALVLVASNQHGDWMEFDRYQEYRYLLAIAALAFAYSLAQALRHALRMRRGVDPVPTASGRLLDFASDQVVAYLLMSGLSAATPLQIG

SEQ ID NO: 204179 - protein, 42 aa, Oryza sativa
  unsure (1)..(42): unsure at all Xaa locations
  Clone ID: PAT_MRT4530_99292C.1.pep
LHRSNIQFNCQSSVFNFLSHLHLQXLSTCARTHLAHSCPRVT

SEQ ID NO: 204180 - protein, 206 aa, Oryza sativa
  unsure (1)..(206): unsure at all Xaa locations
  Clone ID: PAT_MRT4530_99293C.1.pep
TQPKLNIDVTMATTDTTIAHVMDEQEYIKXKSSKCWNLIRPPVTLLTSNSRRISIRLPFLAHEYLMESSRSPLSNGSSFITKFHVVWPQSHKQARVSARPSVCLFFGTPTYQLYSTLICNIRLLLSCSYLFLRFACRNRVDLHRQDQXPTERCIDRXGTTQQRLLPSTHRKIGPTTTLSVKWNSGFIKWYTQFRCYTAISLSLQVL

SEQ ID NO: 204181 - protein, 58 aa, Oryza sativa
  Clone ID: PAT_MRT4530_99294C.1.pep
MSTAISASRGVLLDLDGDDNINCEGLRVVAGIGARVSQIFGILFVSQNSSASSGGDQG

SEQ ID NO: 204182 - protein, 116 aa, Oryza sativa
  Clone ID: PAT_MRT4530_99295C.1.pep
RKITTNVWEAVLIRPPLTDLPQIFTRAYHKPASLPSISRDTKIWERERGVTSRSLFLAARPPARTHAVPGAGGGAVDLVVVGRRRSLLSSSPLPCYCAAILLAPVEAKQARSSTHR

SEQ ID NO: 204183 - protein, 45 aa, Oryza sativa
  Clone ID: PAT_MRT4530_99296C.1.pep
TSRYSRRRRLPPRKIPPLPIPHPRPLQPPPPPPSGSSPPVRSILA

SEQ ID NO: 204184 - protein, 173 aa, Oryza sativa
  Clone ID: PAT_MRT4530_99297C.1.pep
MQMQGWMRTSAYVVPSAAAGPADRSIGARPLCGSPLIDHTHAAVPFGVFLVRLLLFFGSSTRACVVGGLPVGAAWAWAWRCGCVTESACSPSRRSRRARAGGCERRGVTTDGPRMDGCHGLMVMLVGYLGSASAAPPRVGACGVSRVIGIGWPVGAFRAGGSSLFSPSPNKSI

SEQ ID NO: 204185 - protein, 88 aa, Oryza sativa
  unsure (1)..(88): unsure at all Xaa locations
  Clone ID: PAT_MRT4530_99298C.1.pep
ASKPNKNNGDNNAEACYLHGHFFFLRLVIIITVMVRFPTDPSDRFWESWVFYNNTFPWVNMSSNGKVAALPNIDTXGLPQDILGNAST

SEQ ID NO: 204186 - protein, 325 aa, Oryza sativa
  Clone ID: PAT_MRT4530_99299C.1.pep
MAAPDMSPKAGKPLVQNDAGSYLAWSGKDQPTLAGEKLGCGLLVLKPLGFALPHYADSGKFGYVLGGSAVVGVLPVGVDARERVVRLEAADVIAMRAGEVTWCPGDFSYFILAGPMSVLGGLDAGLLATASGLTSPEQAATAFRSQPAALLTRLSRKLHGVRPREHDRHGIVVNAARVPPDSTGGKTVTAAHLPALAQLGLSVGLALLDAGAAVRGPWVLRDAAAQAVYVARGTGRVQVASAGGASTLLDAEVAAGSLLVVPRYAVALVAADDAGRMELVSLIKSSRPAMEHFTGKGSVIGGLTPEIVQAALNVSPELVEQLRTK

SEQ ID NO: 204187 - protein, 106 aa, Oryza sativa
  Clone ID: PAT_MRT4530_9929C.1.pep
MENSGIPGAGCPARKPPGTGKADAETPRKNEEWGPYQRVRGGKRIRAGGKLPQSPAAKRASKRHVVGSGAKEDTTCPGATESSRDQPGPAAKNASPNLSRSNRLGM

SEQ ID NO: 204188 - protein, 99 aa, Oryza sativa
  Clone ID: PAT_MRT4530_992C.1.pep
NAATTLLYIVLRLFHRYIVPRLFHSIPRLSQKMLVSYGVTAICIISTNFISIMQNRHEQQGLCTDSKNSCDSPPHYIYTTINSEDASIHTANASIHTLH

SEQ ID NO: 204189 - protein, 254 aa, Oryza sativa
  unsure (1)..(254): unsure at all Xaa locations
  Clone ID: PAT_MRT4530_99300C.1.pep
MPPVRSAPGRRAPEFRRSSRRRLPEWIWWLVGIFLVLGLMLFVLHHNQREHFRPPVVDKGSEFEETHHEKVNFTEELLSSTSFARQLTDQMTLAKAYVVLAKEHGNLQLAWELSSQIRNCQRLLSEEAVSGKAITKEEAHPIITRLARLIYKAQDSHYDISTTIVTLKSLVNALEERAKAAXVQTAEFGQLAAESVPKNLHCLTVKLTVEWLQNPKHRGRSEEHRNSTRLVDNNLYHFAIFSDNVLATSVVVNS

SEQ ID NO: 204190 - protein, 302 aa, Oryza sativa
  Clone ID: PAT_MRT4530_99301C.1.pep
MAAPDMSPKAGKPLVQNDAGSYLAWSGKDQPTLAGEKLGCGLLVLKPLGFALPHYADSGKFGYVLGGSAVVGVLPVGVDARERVVRLEAADVIAMRAGEVTWWYNDADGGGGEDVTHPVPGRHRRRRQPRLSRKLHGVRPREHDRHGIVVNAARVPPDSTGGKTVTAAHLPALAQLGLSVGLALLDAGAAVRGPWVLRDAAAQAVYVARGSGRVQVASAGGASTLLDAEVAAGSLLVVPRYAVALVAADDAGGMELVSLIKSSRPAMEHFTGKGSVIGGLTPEIVQAALNVSPELVEQLRTK

SEQ ID NO: 204191 - protein, 354 aa, Oryza sativa
  unsure (1)..(354): unsure at all Xaa locations
  Clone ID: PAT_MRT4530_99302C.1.pep
MAATDMSPKAGKPLVENDAGSYLAWSGKDQPAVAGEKLGCGLLVLKPLGFALPHYADSGKFGYVLGGSAVVGVLPAGVDARERVVRLEAGDVIAMRAGEVTWWYNDTDGEDVTIVFMGDTGRRRQXGDISYFVLAGPMGVLGGLHAGLLAKASGLTSPEQAATAFRSQPAALLTRLNGKLHGVRPREHDRHGLVVNAARVPADSNTGGAXRREKTVTAAHLPVLAQLGFSVGLTRLDAGAAVRGPWVLRDAAAQAVYVARGSGRVQVAGAGGASTLLDAEVAAGSLLVVPRYGVSLAAADDAGGMELVSLIKSPRPATEHFTGKGSVIGGLTAEIVQAALNVSPEFVEQLRTKY

SEQ ID NO: 204192 - protein, 110 aa, Oryza sativa
  unsure (1)..(110): unsure at all Xaa locations
  Clone ID: PAT_MRT4530_99303C.1.pep
TTIVTVGMVGNTLQLSLGLHLNRPAKTWIQRRRGRFGRTRAXPTSPPFGWRPPLFLLYATXPTFRLAASSISPLCRFVNFGPVXRVNSEFLAHSCISLIVDIVRWTYLLC

SEQ ID NO: 204193 - protein, 184 aa, Oryza sativa
  unsure (1)..(184): unsure at all Xaa locations
  Clone ID: PAT_MRT4530_99304C.1.pep
WCSGAALSVMAPGQPANPRLLMREHPXHSGQVANRLTQDQVAAMFLPPQPPRQQPLQPIQRTPLRQQIVQPIQHQGSVSTSAGFATPGGQPVQQFLNQVVPEHLVHHVQPDGTVMPQVVPEHLVRNIQPNLHNYQGGNLNYQYQPPSPQAQYHPGGLAQPQFASQYGQFGPMQQQSQGAAQQRP

SEQ ID NO: 204194 - protein, 1700 aa, Oryza sativa
  unsure (1)..(1700): unsure at all Xaa locations
  Clone ID: PAT_MRT4530_99305C.1.pep
MAEKPPLSPSSASPSTVKEKIQKLGLTDVNEGNVVPIDLEKFTPEQKKDFEAMLQQALDQFLNSFMQTRKGTLVQKYKVKVVVDDPGTSSSKVEDGRQAPDGSAQLSDKGATDGSLGSKGDKSQGVHGVQGDGVHGVQGDGVHGVQGDGTQGLQRGNLNQNSDAAQDFFNNFQDRVDYAVHHALINQSGVLVNTLSNMMKSIADGSVAEHQAAGPVYLQGGVFPNYRPLITDAQPSIRAVSPVAPSAQPTAPASTPLPAPSALAPGQLVNPQLLMREQPQHSGQVVNRPTQDQVAAMFLPPQPAVDPLQXSRFNRHSRFSRLYNQSSNKLCNQXANATKATASAADSANTVKTANRSADSASRLNECIGRPPSPQAQYQPXDWLNLSLRLSTPYPEWFERVPLPNRFKVPDFSKFSGQDGVSTYEHISRFLAQCGEASAVDALRVRLFRLSLSRLAFTWFSSLPYGSINSWADLEKQFHSYFYSGVHEMKLSDLTVIKQWHDEPVHEYIQRFREMRNKCFSLSLTDAQLADLAFQGMIAPIREKFSSEDFDSLSHMIQKVTLHKHRSAETRKSSKKVNHFVLTCVAGKIFDLLLREKQIQLPAGHTIPSAEELGKKRYCKWHNSGSHSTNDCKVFRQQIQVAIEGGKIKFDDSKKPMRVDGNPFPVNMVHTAGQTADMGRMRGYQVSSARIINKYQRKYDKQQERHHEEDNGGFDPHWGCEFFRFFWNEGMRLPSIEDCPGCSDVARGSSRLYDGGNWPKQTRVLVHQILGPVNQRGDSEYDENKKTQWCPPGIFTKNQKRRVQRLRSRERFQEVEQEINHWLKKAKPRQEWRVKNQAPVVDDVVADEAKRLAKGKSVVTAPVNMVFTLPAEFRIDQADVDEVEEESAKLVLSPEQAVFEKPDGTENRHLKPLYINGYVNGKPMSKMMIDGGATVNLMPYATFRKLGRNAKDLIKTNMVLKDFGGNPSETKGVLNVELTVDSKTIPTTFFVIDGKGSYSLLLGRNWIHANCCIPSTMHQCLIQWQGDKIEIVPADSQLKMENPSYYFEGVVEGSSVYTTDTVDDLDDKQEHRLPIKPGVRPHQQPPRRCKADMLEPVKAEIKRLYDAGFIRPCRYAEWVSSIVPVIKKNGKVRVCIDFRDMNKATPKDEYPMPVADQLVDVASGNKILSFIDGNAGYNQIFMAEEDIHKTTFRCPGAIGLFEWVVMTFGLKSVGATYQRAMNYIYHDLICWLVEVYIDDVVVKSKEVKDHIADLRKVFERTRKYGLKLNPTKCAFGVSAGQFLGFLVHERGIEITQRSINAIKKIKPPENKTELQEMIGKINFVRWFISNLSGKLEPFTPLLRLKADQQFTWGAEQQKALDNIKGYLSSPPVLIPLQKGYLLDCICRPADVVRYMLSAPILKGRVGKWIFSLTEFDLRYESPKAIKGQAVADFIVEHRDDSIGLVEMVPWTLFFDGSVCTHGCGIGLVIISPRGACFEFAYTIKPYATNNQAEYEAVLKGLQLLKEVEADAIEIMGDSLLVISQLAGEYECKNDTLIVYNEKCQELMKEFQLVTLKHVSREQNIKANDLAQGALGYKPMIKDVKVEIAAITADDWRKLRYKALKYTLLDDELYYRTIDGVLLKCLSADQAKVAIDEVHEGICGTHQSAHKMKWLLRRVGYFWLTMLEDCFRTSQGTQTTIVDIQTHVLQKYKRLQMQRER

SEQ ID NO: 204195 - protein, 76 aa, Oryza sativa
  Clone ID: PAT_MRT4530_99306C.1.pep
MTGASKTSSWTTGDLLFSLVTRAADLAAWRLGVTGSSCLEFWMCRPSCASKGFSLMLELARFIKSSTTLFFWLTEV

SEQ ID NO: 204196 - protein, 702 aa, Oryza sativa
  Clone ID: PAT_MRT4530_99307C.1.pep
MPVADQLVDAASGHKILSFMDENTGYNQIFMAQEDIHKTAFRCPGAIGLFEWVVMTFGLKSAGATYQRVMNYIYHDLIGWLVEVYIDDVVVKSKEIEDHIADLRKVFERTRKYGLKMNPTKCAFGVSAGQFLGFLVHERGIEVTQRSVNAIKKIQPPENKTELQEMIGKINFVRGFISNLSRRLEPFTPLLRLKANQQFTWGAEQQKALDNIKEYLSSPPVLTPPHKGIPFRLYLSAGEKSIGSVLIQELEGKERVIFYLSRQLLDAETRYSAVEKLCLCLYFSCTRLRHYLLSNECTVICKADVVKYMLSAPIFKGRVGKWIFSLTEFDLWNESPKEIKGQAIADFIVEHHDDSISSVEIVPWTLFFDGSVCTHGCGIGLVIISPRGACFEFAYTIKPYATNNQAEYKAVLKGLQLLNEIEADAIEIMGDSLLNIEANDLAQGASGYKPMIKDVKVEVAAITADDWRYYKGCQDCQKFGAIQRAPASAMNPIIKPWPFRGWGIDMIGMINPPSSKGHKFILVATDYFTKWVEAIPLKKVDSGDAIQFVQEHIIYRFGIPQTITTDQGSIFVSTEFVQFADSMGIKLLNSSPYYAQANGQAETSNKSLIKLIKRKIYDYPRQWHTRLAEALWSYRMACHGSIQVPPYKLVYGHETVLPWEVRIGSRRTELQNDLTADEYYNLMADEREDLVQSRFVSPCKGY

SEQ ID NO: 204197 - protein, 522 aa, Oryza sativa
  Clone ID: PAT_MRT4530_99308C.1.pep
MKALVSSSCLPSSACGRRPSPPLFFVCLLVCWAFAAQEISEAEVDDGGSIDNRLSSLIRDSNIEVPNESAKNFFKLMEEDRKELYPGCKEATMVSFIVRLFQIKCMYGISNNAMEQILHLFCLLLPEGHCVPNTLDKVRKVVQDLGLDYQKIHACVNDCVLFRGEYDNMNRCPTCGESRWKNIYSGELGEGSGIGGVKKKVLRPRKILRCRKNKVSFNNKVEMRGTPVALSGDEVLKQYESFEQVKFGMMSRKRKQRDEDTRWHNWRKKNVMRIENNICESLLGTLLDLTGKSKDSEKARLDLQELGIRKNQHLLVHKGKYTLSAALYTLSPSQKEILCRFLQHVKMPDGYASNIKRCVDENGWKVSGLKSHDYLVLLQKLLPLVVCHILPEDVVIPLIELSRFFNKLCSKELEVTEIEKLCNSIGETLCRLEMIFPPSFFDIMMHLLVHIASEARIRGPVCYRWMYPVERYLRTLKGYVRNKACPEGSIAEVYISEECLTFCARFFEDVSTKVNRPERQEM

SEQ ID NO: 204198 - protein, 2006 aa, Oryza sativa
  unsure (1)..(2006): unsure at all Xaa locations
  Clone ID: PAT_MRT4530_99309C.1.pep
DQINWHACIPEGEFWTCTGVKQISQASCFMSTRFWYAWWDRSEVRITTTVFPMAEKPPASPSSAGEPGYVKAKIHKLGLSEVDEANIVPVTMDKLTPEQQKDLEAMMXQARNQFLSSFTETRKGTLVQKYKVKVIGDVPGTGSSKDGEVKQALDDAAQPSNKGAADGFQGDQGDGSQGVQGVGSQGIQGVQDQVDYAMHHALINQSGILVNTLSNMVKIMVDGSMAEYQATXPVYLPGGVFLNYRPLVTDNQPAVQSIPLNAPSAQPTAPVSAPAPAAPSSAPGQLVNPRLLVREKPQHSGXNVNRLTQDHVAAMFLSPQPTVDPTQXSRFSKYPRLDECIGWVCNTXQSAKAACCESSCFRALGSSCTARSDDVMKEXFGLRPKDARNLYRYPYPEWFERVPLPNRFKVPDFSKFSGQDSVSTYEHVSRLLAQCGEASAVEALRVTLFRLSLSRSAFTWFTSLPCGLINSWPDLEKQFHSYFYSGIHEMKLSDLTVIKXRHDESVHEYIQRFREMRNKCYSLSLTDAQLADLAFQGMIAPIREKFSFQDFDSLSHLAQKVTLHEQRFAEARKNFKRVNHVCPYIYGSDDDDDDDSEIAAAEWVKSKKVISCQWVKNSGKEERYDFDITQADKIFDLLLREKQIQLPAGHTIPLAEELGKRRYYKWHNFGSHSTNVCKVFRQQIQAAIEGGKIKFDDSKRPMKVDGNPFPVNVVHTAGRIADGGHARGFXVNSAKIIDKYQKRYDKQQERHYEEGDDGMRLSSIEDCPGCGNIAESSSRSYNRGNRLKQTRVPVHQRLVPVNQDCNQEGNEDRKTQWCPSGIFIKNQKRRKMKPKQEWRVKNQAPIADEAAADEAKRLAKGKSVVTASVNMVFTLPAEFGVKQADVDEVEEESAKLILSPEQAIFEKPEGTENRHLKPLYINGYVNGKPMSKMMVDGGAAVNLMPYATFRKLGRNAKDLIKTNMVLKDFGGNPSETKGVLNVELTVGSKTISTTFFXIDGKGSYSLLLGRDWIHANCCIPPTMHXCLIQWQGDKIEIVPADSQLKMENLSYYFEGVVDDLDDKQGQGFMSADDLEEIDIGPEFRTKLIELLKEFRDCFAWEYYEIPGLSRSIVEHRLPIKPGVRPHQQPPRRCKADMLEPVKAGIKRLYGAGFIRPCRYAELVSSIVSVIKKNDLNKATPMDEYPMPVADQLVDAASGHKILSFMDGNAGFNQIFMAEEDIHKTAFRCPGAIDLFEXAVMTFGLKSAGATYQRAMNYIYHDLIGXLVEVYIDDVVVKSKEIXDHIVDLRKVFERTRKYGLKMNPTKCAFGVSAGQFLGFLVHERGIEITQRSVNAIKKIQPPENKTELQEMICKINFVRRFISNFSGRLEPFTPLLRLKADQQFTWGAKQQKALDNIKEYLSSPPVLIPPQKGIPFRLYLSAGEKSIGSVLIQELEGKERVVFYLSRQLLDAETRYSPVEKLCLCLYFSCTRLRHYLLSNEFTVVCXADVIKYMLSAPILKGRVGKWICSLTKFDLRYESPKAVKGQAIADFIVEHRDDSVGSVEIVPWTLFFDGLVCTHGCGIGLVIISPRGGASFEFAYTIKPYATYNLAEYEVVLKALQLLKEVEADAIEIMGDSLLVISQLAGEYECNNDTLIVYNEKCQELMKEFRLVTLRHVSREQNIESNDLAQGASGYKLMIKDVKVEVATLTADDWRYDVHXYLQNPSQSTSHKLRYKALKYTLLDDELYYRTIDGVLLKCLSADQAKVAIGEVHEGICGTHQLAHKMKXLLRRAGYFWPTMLEDCFKYYKGCQDCQKFEAIQRAPASAMNPIIKPWPFRGWGXIDMISMINPPSSKGHKFILVATDYFTKWVKAIPLKKVDSGNAIQFVQEHIIYRFGIPQTITTDXGSIFVSDEFVQFADRMGIKLLNSSPYYAQANGQAEASNKSLLKLIKRKIFDYPRQWHTRLAEALWSYRMACHGSIQVPPYKLVYGHEAVLPWEVRIGSRRTELRNDLTADEYYNLMADE

SEQ ID NO: 204199 - protein, 68 aa, Oryza sativa
  Clone ID: PAT_MRT4530_9930C.1.pep
LQEGYLAGSCELIKSSNIERETTHITTSFIGYKPYLAALTRVHVNYMLGGLYKQVNIRMAHVTSLQTL

SEQ ID NO: 204200 - protein, 1580 aa, Oryza sativa
  Clone ID: PAT_MRT4530_99310C.1.pep
MKLSDLTVIKQKHDEPVHEYIQRFREMRNKCFSLSLTDAQLADLAFQGMIAPIREKFSSEDFESLSHLTQKVTLHEQRFAEARRNSRKVNNVCSYMCGSDDEDDDSEIAAAEWVRSTKVIPCQWVKNSGKEERYDFEITNANKIFDLLLREKQIQMPASHTIPSAEELGKKRYCKWHNSGSHTTNDCKVFKQQIQTAIEGGKIKFDDSKRPMKVDGNPFPVNMVHTAGRTADGGRARGFQVNSAKIINKYQKKFCWNEGMRLPSIEDCPECGNVAESSSQSYIKGNRLKHARVSVHQRLGPVNQDHDPEDDKKRKTQWCPPTEFGIDQADVDEIEEESAKLILSPEQVVFEKPEGTENRHLKPLYINGYVNGKPMSKMMVDGGAAVNLMPYATFRKLGRNAEDLIKTNMVLKDFGGNPSETMGVLNVELTVGSKTIPTTFFVIDGKGSYSLLLGRDWIHANCCIPSTIHQCLIQWQGDKIEIVPADSQLKMENPSYCFEGVMEGSNVYTKDTVDDLDDKQGQGLMSADDLEEIDISPAIGQGRHLLIELLKEFRDCFTWEYYEMPGHSRSIVEHRLPLKPGVRPHQQLPRRCKADMLEPVKAEIKRLYDAGFIRPCRYAEWVSSIVPVIKKNGKVRVCIDFRYLNKATPKDEYPMLVADQLVDAASGHKILSFMDGNAGYNQIFMAEEDIHKTTFRCPGAIGLFEWVVITFVLKSAGATYQRAMNYIYHDLIGWLVEVYIDDVVVKSKEIEDHIADLRKVFERTRKYGLKMNPTKCAFGVSAGQFLGFLVHERGIEVTQRSINAIKKIKPPEDKTELQEMIGKINFVRRFISILSGKLEPFTPLLRLKADQQFAWGAEQQKALDNIKEYLSSPPVLIPPQKGIPFRLYLSAGDKSISSVLIQELERKERVVFYLSRRLLNAETRYSPVEKLCLCLYFSCTRLRHYLLSNECTVICKADVVKYMLSAPILKGRIGKWIFSLTEFDLRYESPKAIKGQAIANFIVDYRDDSIGSVEVVPWTLFFDGSVCTHGCGIGLVIISPRGACFEFAYTIKPYATNNQAEYEAVLKGLQLLKEVEADTIEIMGDSLLVISQLAGEYECKNDTLIVYNEKCQELMREFRLVTLKHVSREQNIEANDLAQGASGYKLMIKHVQIEVAVITADDWRYYVYQYLQDPSQSASRKLRYKALKYILLDDELYYRTIDGVLLKCLSTDQAKVAIGEVHEGICGTHQSAHKMKWLLRCAGYFWPTMLEDCFRYYKGCQDCQKFGAIQRAPASAMNPIIKPWPFRGWGIDMIGMINPPSSKGHKFILVATDYFTKWVEAIPLKKVDSGDAIQFVQEHIIYRVGIPQTITTDQGSIFVSDEFIQFADSMGIKLLNSSPYYAQANGQAEASNKSLIKLIKRKISDYPRQWHTRLAEALWSYRMACHGSIQVPPYKLVYRHKAILPWEVRIGSRRTELQNDLTADEYSNLMADEREDLVQSRLRALAKVIKDKERVTRHYNKKVVPKDFSEGELIWKLILPIGTRDSKFGKWSPNWEGPFQIHKVVSKGAYMLQGLDGEVYDRALNGKYLKKYYPSVWVNA

SEQ ID NO: 204201 - protein, 1529 aa, Oryza sativa
  Clone ID: PAT_MRT4530_99311C.1.pep
MAEKQPPPPSSPGSVKGKALKLGLTDIIEENVMPIDPEKFTPEQKEEFEATLQQARDQFLNSFMQTRKGTLVQKYKIKVVADSPRTGSSKDGEVKQAPGGSAQPSTKGATNGSLGDQGDNSQGVHGVQGDGAQGPQGGNLNQNSEVAQDFFNNFQDRVDYAVHHALINQSRVLVNTLSNMMKTIADSSIAKHQAACPVYLQGGVFPNYRSLITDVQPSIQAVPSVAPTTQPTAPVSTPLPATLAMTPGQPVNPQLLMRQQPQHGGQAANRLTQDQVAAMFLPPPPIVDPVQQQPIQQTPPIQPVVQPIQQQVVQPAQQTPPSQQPLQPIQQTPPRQQPLQPIQQTPLRQQIPPSPQAQYQLGGLAQPQFASQPPSPQAQYQPGGLAQPQFASQYGQFEPMQQQPQGAAQQRPWADVIVDKVTLHEHRSAEVRKSSKKVNHVCPYMYGSDDGEDDSEIAAAKWVRSKKVIPCQWVKIPKKEKYDFDITKADKIFDLLLREKQIQLPAGHTIPSAEELGKKRYCKWHNSGSHSTNDCKVFRQQIQVATEGGKIRFDDSKKPMKVDGNPFPVNMVHTAGQTADRIRAKGFQVNSAKIINKYQRKFFWNEGMRLPSIENCPGCSDIIESSSRSYNKGNRLRQARLPIHQRLGPMNQDHGQEDEVIRKNQWCPSGIFTKNQKRRVQRLRNRERLQEVEQEINHRLRKPKPRQEWRVKNQVPVADDAAADEAKRKLDRNAEDLIKTNMVLKYFGGNPSETKGVLNVELTVGSKTIPTTFFVIDGKGSCSLLLGRDWIHANCCIPSTMHQCLIQWQGDKIEIVPVDSQLKMENPSYYFEGVVEGSNVYTKDTVDDLDDKQGQGFMSADELEEINIGPSDRPRPTFISKNLSPEFRTKLIELLKEFRDCFAWEYYEMPRLSRSIVEHRLPIKPGVRPRQQPLRRCKADMLEPVKAEIKRLYDAGFIRPCRYAEWVSSIVSVIKKNGKSKEVEDHIADLRKVFERTKKYGLKMNPTKCVFGVSAGQFLGFLVHERGTEVTQRSVNAIKKIQPLENKTELQEMIGKISNLSGRLRHYLLSNECTVICKADVVRYMLSAPILKGRVGKWIFSLTEFDLRYESPKAIKGQAIADFIVEHRDDSIGSVEIVPWTLFFDGSVCTHSCGIGLVIISPRGACFEFAYTIKPYATNNQAEYEAVLRGLQLLKEVEADTIEIMGDSLLVISQLAGEYECKNDTLMVYNEKCQELMKEFRLVTLKHVSREQNIEANDLAQGASGYKPMIKDVKVEIAAMTADDWRKLRYKALKYTLLDGELYYQTIDGVLLKCLSADQAKVAIGKVHEGICANGQAEASNKSLIKLIKRKISDYPRQWHTRLAEALWSYRMACHGSIQVPPYKLVYGHEAVLPWEVRIGSRRTELQNDLTADEYYNLMADEREDLVQSRLRALAKVTKDKERVARHYNKKVVPKDFSEGELVWKLILRIGTCDSKFGKWSPNWEGPFQIHKVVSKGAYMLQGLDGEVYGRALNGKYLKKSYPSVWVNA

SEQ ID NO: 204202 - protein, 55 aa, Oryza sativa
  Clone ID: PAT_MRT4530_99312C.1.pep
MSNGAIIGASTVLVVEGEEAVSVESIKNSGGGKEDVQLCTSENTLKDICQTTYYH

SEQ ID NO: 204203 - protein, 632 aa, Oryza sativa
  unsure (1)..(632): unsure at all Xaa locations
  Clone ID: PAT_MRT4530_99313C.1.pep
MAEKQPPPLSPASPGSVKEKMLKLGSTDVNEGNVVPIDPEKFTPEQKKEFEAMLQQKYKIKVVADDPGTSSSKDGDGKQALDDSAQPSNKGATDVSLGNQGDNSQGVHGMQGDGAQGLQGGNLNQNSDAAXDFFSNFQDRVDYAVHHALINQSRVLVNTLSNMMKSIADGSIAEHQAAGPVYLQGAADSADTPNSAGCTTNPATGHATXQQTPPRQQPLQPIQQTLLRQQIVQLIQHQGSISASAGFATPGGQPVQQFLNQVVQEHLVHHVQPDGTVMPQVVPEHLVRNIQPNLHNYQGGNLNYQYQPPSPQAQYQPGGLAQPQFASQYGQFEPMQQQGAAQQRSWADVIADVMREQFGLKPKETRSLYRQPYPEWFERVPLPNRFKVPDFSKFLGQDGVSTYEHISRFLAQCGEASAVDTLKVRLFRLSLSESTFTWFSSLPYGSINSWADLEKQFHSYFYSGVHEMKLSDLTAFKQRHDEPVHEYIQRFKEMRNKYFSLSLTDAQLADLAFQGMIAPIREKFSSEDFDSLSHLIQKVTLHEHRSAEVRKSSKKVNHVCLYMYGSDDDEDDSEIAAAEXMRSKKVIPCQWVKSSGKEEKYDFDMTKADKIFDLLLREKQIQLPAGHIIPSA

SEQ ID NO: 204204 - protein, 2282 aa, Oryza sativa
  Clone ID: PAT_MRT4530_99314C.1.pep
MSGQTGDGKDGDKGSTFPYDYPSTSTSYVSTYSGKASYFNGTDYAAWKHKMKMHLKFINPSIWRIVEKGYVLQKPEDPTKEDDENEHKNAQAANAILSALSGSEFNRVDGIESAKVIWDTLRNLHEGTDSVRESKVEILKGQFERFVMLDGESPSDMYDRLSKIVNEIKGLGSKDMTDEVVVKKMVRAITPRNSTLVTIIRERLDNKTLTPHDLLGRILAHDMLVQESKEGSSSKHHSNKSSGRHSARVCYVCKEPGQFIADCPYLKDGSHIKEDKKGEKKDEKKEKHKHSKRERYGQAHLGMIFGSDSESSSSDEGVATFAVKPSSPPRLFNYSSDEDAPICLMAKEPKVPSSLKSINVDLVCDEEDDVEDEVMDEELFKSITKESLPHLSELLGRIDDQYATLERRQEALLIREKERSHELKEINMGKSLPQRLMDQINWHANIPEGELWTCTGVKQISQASCFTSTRFWHAQWDQEEVSKQFFLMAEKPPLSPSSASPSTVKEKIQKLGLTDVNEGNVVPIDPEKFTPDQKKDFDAMMQQARDQFLNSFMQTSKGTVVQKYKVKVVADDPGTSSSKGEDGKQAPDGSAQPSDNGATDGSLGGQRDNSQGVHGVQGDGVHGVQDVMKEQFRLRPKDAGNLYRQPYPKWFERVPLPNRFKVPDFSKFSWQDSTSTYEHISRFLAQCGEASAVDALKVRLFRLSLAGSTFTWFSSLPYGSINSWADLEKQFHSYFYSGIHEMKLSDLTSIKQKHDEPVHEYIQRFREMRNKCYSLSLTDAQLADLAFQGMIAPIREKLSSEDFESLSHLTQKVALHEQRYAEARKNSRKVNHVCPYKYGSDDEDDDSEIAAAEWVRSKKVIPCQWVKNSGKEERYDFDISKADKIFDLLLREKQIQLPAGHTIPSAEELGKKRYCKWHNSGSHTTNDCKVFRQQIQAAIEGGKIKFDDSKRLMKVDGNPFPVNMVHTAGRTADRGRARGFQVNSAKIINKYQRKYDKQQEKHHEEDDDGLRLPSIEDCPGCSDIAKNSSRSYGRGNRLRQTRVPVHQRLGPVNQDHGQEDNEIRKNQWCPSGIFTKNQKRRKTKSRQEWRVKNQVPVADEATAEEAKRLAKGKSVVTASVNMVFTLPAEIGTKQADVDEVEEESAKLILLPEQAIFEKPEGTENRHLKPLYINGYVNGKPMSKMMVDGGAEVNLMPYATFRKLGRNVEDLIKTNMVLIDFGGNLSETKGVSNVELTVGNKTIPTTFFVIDGNGSYSLLLGRDWIHANCCIPSTMHQCLIQWQDDKIEIVPADSQLKMENPSCYFEGVVEGSNVYIKDTVDDLDDKQGQGFISADDLEEIDIGPGDRPRPTFICKNLSTEFRAKLIELLKEFRDCFAWEYYEMPGLSRSIVEHRLPIKPGVRPHQQPLRRCKADMLEPVKVEIKRLYDACFIRPCRYAEWVSSIVPVIKKNDLNKATPKDEYPMPVADQLVDAASGNKILSYMDGNVGYNQIFMAEEDIHKTAFRCPGAIGLFEWVVMTFGLKSAGATYQRAMNYIYHDLIGWLVEVYIDDVVVKSKEIEDHIADLRKVFERTRKYGLKMNPTKCAFGVSVGQFLGFLVHERGIEVTQRSVNAIKKIQPPENKTELQEMNGKINFVRRFISYLSGRLEPFTPLLRLKADQQFTWGAEQQKALDDIKEYLSSPPVLIPPQKGISFRLYLSAGEKSIGSVLIQELDGKERVVFYLSRRLLDVETRYSPMEKLCLCLYFSCTRLSHYLLSNECTVICKADVIKYMLSAPILKGRVGKWIFSLTEFDLRYESPKAIKGQAIADFIVEHCDDSIGSVEVVPWTSFFDGSVCTHDCGIGLVIISPRGACFKFAYTIKPYATNNQAEYEAVLKGLQLLKEVEADAIEIMGDSLLVISQLAGEYECKSDTLMVYNEKCQELMQEFRLVTLKHVSREQNIEANDLAQGASGYKPMIKDVKAEIAAITAGDWRYDVHQYLHNPSQSASRKLRYKALKYTLLDDELYYRTIDGVLLKCLSADQAKVAIGEVHEGICGTHQSAHKMKWLLRRARYFWPTMLEDCFKYYKGCQDCQKFGAIQRAPASAMNPIIKPWPFRGWGIDMIGMISRPSSKGHKFILVATDYFTKLVEAIPLKKVDSGDAIQFVQEHIIYRFGIPQTITTDQGSIFVSDEFVQFVDSMGIKLLNSSPYYAQANGQAEASNKSLIKLIKRKNSDYPRQWHTRLDEALWSYRMACHGSIQVPPYKLVYGHEAILPWEVRIGSRRTELLNGKYLKKYYLSVWVNA

SEQ ID NO: 204205 - protein, 49 aa, Oryza sativa
  Clone ID: PAT_MRT4530_99315C.1.pep
MTAEEGAVRFSSPQLRLGMALALERERRKCSKKTNGQTLDKKSYIKIWG

SEQ ID NO: 204206 - protein, 75 aa, Oryza sativa
  unsure (1)..(75): unsure at all Xaa locations
  Clone ID: PAT_MRT4530_99316C.1.pep
GGXFVGVFFXGALFPGCAHGIALPLLQRTFAPRGEKQQPPENSCNVNRAIYKNFGFRISNYKIFGGRTPKKRTGG

SEQ ID NO: 204207 - protein, 2093 aa, Oryza sativa
  unsure (1)..(2093): unsure at all Xaa locations
  Clone ID: PAT_MRT4530_99317C.1.pep
MATLTVARWEWRSGGEPRRRRGGRGGSRPREPDGGDGAGSENSSKNPVSEFRHVELKKNSTCQFQLLFALIYKGLLLLCTGLGGELRGVTFMQTRKGTLIQKYKVKVVADDPRTSSSKGDDGKRALDGSAQLSDKGATDGSLGSQGDNSQGVHGVQGDGVHGVQGDGAQGLQGGNLNQNSGAAQDFFNNFQDRVDYAVHHALINQSGVLVNTLSNMMKSIADGSIAEHQAAGPVYLQGGVFPNYRPLITDAQPSTQAAFPVAQSAQPMALALTPLPASSALAPGQLVNPQLLMREQPQHSGQVVNRPTQDQVAAMFLPPQPTVDPIQXSRFNRYSRFSGSYNQSSNKLSSFSASPISARGTGSTLVCXLSTGAAQQRPWVDVIADVMREQFGLKPKETRSLYRQPYPEWFERVPLPNRFKVPDFSKFSGQDGVSTYEHISRFLAQCGEASAVDALRVRLFRLSLSGSAFTWFSSLPYGLINSWADLEKQFHSYFYSGVHEMKLSDLTAIKQRHDEPVHEYIQRFREMRNKCFSLSLTDAQLADLAFQGMVALIRENFSSEDFDSLSHLIQKVTLHEHRSADARKSSKKVNHVCPYMYGSDDDEDDSEIAAAEWVRSKKVIPCQWVKSSGKEEKYDFDITKADKIFDLLLREKQIQLLAGHMIPSAEELGKKRYYKWHNSGSHSTNDCKVFRQQIQMAIERGKIKFDDSKKSMRVDGNPFPVNMVHTAGRTANTGRMRGYQERHHEEDNGGFDPHWGCEFFRFCWNEEYDENKKTQWCPPGIFTKNQKRRVQRLRSRERFQEVEQEINHRLKKAKPRQEWRVKNQAPVADDVAVDEAKRLAKGKSVATAPVNMVFTLPAEFGIDQADVDEVEEESAKLVLSPEQAVFEKPEGTENRHLKPLYINGYVNGKPVFKMMVDGGAAVNLMPYATFRKLGRNAENLIKTNMVLKDFGGNPSETKGVLNVELTVGSKTIPTTFFVIDGKGSYSLLLGRDWIHANCCIPSTMHQCLIQWQGDKIEIVPADSQLKMENPSYYFQGVVEGSDVYTTDAVDDLDDKQGQGFMSADDLEEIDIGPSDRPRPTFISKILSPEFRTKLIELLKEFRDCFAWEYYEMPRLSRSIVEHRLPIKPGVRPHQQPPRRCKADMLEPVKAEIKRLYDAGFIRPCRYAEWVSSIVLVIKKNGKVRVCINFRDLNKATPKDEYPIPVADQLVDAASGNKILSFMDGNAGYNQIFIAEEDIHKTAFRCPGAIGLFEWVVMTFGLKSAGATYQQAKNYIYHDLIGWLVEVYIDDVIVKSKEIKDHIADLRKVFERTRKYGLKMNPTKCAFGVSAGQFLGFLVHERGIEITLRSINAIKKIKPPKNKTELQEMIGKINFVRRFISNLSGKLEPFTPLLRLKADQQFTWGTEQQKALDNIKGYLSSPPVLIPLQQGIPFRLYMSAGEKSIGSVLIQELDGKERVVFYLSRRLLDVETRYSPVKKLCLCLYFSCTRLRHYLLSNECTIICKADVVRYMLSAPILKGRVGKWIFSLTELDLRYESLKAIKGQAVADFIVEHRDDSIGSVEMVPWTLFFDGSVCTHGCGIGLVIISPRGACFEFAYTIKPYATNNQAKYEAMLKGLQLLKEVEADAIEIMRDSLLVISQLAGEYECKNDTLIVYNEKCQELMKEFRLITLKHVSREQNIKANDLAQGVSGYKPMIKDVKVEIAAITADDWRKLRYKALKYTLLDDELYYRTIDGVLLKCLSGNQAKVAIGEVHEGICGTHQSAHKMKWLLRRAGYFWPTMLEDCFRYYKGCQDCQKFGAIQRAPASAMNPIIKPWPFRGWGIDMIGMINPPSSKGHKFILVATDYFTKWVEAIPLNKVDSGDAIQFVQEHIIYRFGIPQTITTDQGSIFKSDEFVQFADSVGIKLLNSSPYYAQANGQAEASNKSLIKLIKRKISDYPRQWHFRLAEALWSYRMACHGSIQVPPYKLVYGHETVLPWEVRIGFRRIELQDGLTADEYYNLMADEREDLVQSRLRALAKVTKDKERVARHYNKKVVPKDFSEGELVWKLILPIGTRDNKFGKWSPNWEGPFQIYKVVSKGAYMLQGLDDEVYG

SEQ ID NO: 204208 - protein, 184 aa, Oryza sativa
  unsure (1)..(184): unsure at all Xaa locations
  Clone ID: PAT_MRT4530_99318C.1.pep
PLLRLKANQLFTWGAEQXKALDNIKEYLSSPPVLIPPQKGVPFRLYLSAGEKXIGSVLIQELEGKERVVFYLSRRLLDAETRYSPVEKLCLCLYFSCTRLRQYLLSNECTVICKADVVKYMFSAPILKVRVGKWIFSLTEFDLXYESPKAIKGQAIADFIVEHRDDSIGSVEIVPSTLFFDGSV

SEQ ID NO: 204209 - protein, 192 aa, Oryza sativa
  Clone ID: PAT_MRT4530_99319C.1.pep
IVLALGLQTIVSSNCQREIPSSNIDLHSAHCARNLQKCEHCGEMVARKLMDEHYNESHAPVNCTLCKEIVTREIWDLHKSEQCPQRIVACEYCEFELPAVELHEHQDVCGNRTEFCQTCKKYVRLREWIGHEIQCHANANANASAQREVRPPPPVRPPRPMHGAQHKRLLFTIAVTGIAVMIGSILFQREES

SEQ ID NO: 204210 - protein, 174 aa, Oryza sativa
  Clone ID: PAT_MRT4530_9931C.1.pep
MAARASRLPAAELVAARVEVEAAADAAQAAAAELKALRDNSSSSSVSAYDIPADELTREAARERVEQRAAAQPHTRRSSSPAGRGCVGGVPGRSARGSGSPDGLGRIGGPLGRGAHDGGAPGGNGLVDGDRGRCRRLVSPSPDRYRGHHGIQAVIREVSPGGGWPAFTKTNYIE

SEQ ID NO: 204211 - protein, 79 aa, Oryza sativa
  Clone ID: PAT_MRT4530_99320C.1.pep
PFCKDDLNWESIDAPFSEPASHDERPVAIDEDEAPSTLSSRPAASAVDLYCPTPDDPYMSSQRMKLHSYLFETGTSFPY

SEQ ID NO: 204212 - protein, 219 aa, Oryza sativa
  unsure (1)..(219): unsure at all Xaa locations
  Clone ID: PAT_MRT4530_99321C.1.pep
MAAAATAADAGSDPSAALAAAAATSTCAHCQREIPSSNIDLHSAHCARNLQKCEHCGEMVARKLMDEHYNESHAPVNCTLCKEIVTREIWDLHKSEQCPQRIVACEYCEFELPCGLSXHEPSTDVCGNRTEFCQTCKKYVRLREWIGHEIQCHANANANASAQTSSARIIPEREVRPPPPVRPPRPMHGAQHKRLLFTIAVTGIAVMIGSILFQREESF

SEQ ID NO: 204213 - protein, 95 aa, Oryza sativa
  unsure (1)..(95): unsure at all Xaa locations
  Clone ID: PAT_MRT4530_99322C.1.pep
SFGGFCLTLGINNQPVKASQKTVHRLXKLNIGRSPLCPAGVGSNIIAPLSAVKKPLKAIPLAPGGAEGTTRNSGKVLYPXGSRRIPITCPKEEDL

SEQ ID NO: 204214 - protein, 110 aa, Oryza sativa
  Clone ID: PAT_MRT4530_99323C.1.pep
MGRGKWGIGFRGMAYELVVAGAKQDEGEWVEADRAGLRQWQRRQGIEADLDLDFALEGERRELTGERPSLRCHRQRVAHSCSHRQSRRAAHSVVRAQYNARKTRDKVERV

SEQ ID NO: 204215 - protein, 511 aa, Oryza sativa
  Clone ID: PAT_MRT4530_99324C.1.pep
MTMVEAEAGKEAIRRALRSLRRRHLVEEGAHRPAIEALARPFAAQAVEWKEKAEKHELELQQCYKAQSRLSEQLVTEIEEGKASKALLKEKETLITTMQTELEQTREENTQLKQSLEEKTSALDLIIQEHQAVKAELEQALTKQKVAEDENRNLIDRWMLEKMKDAERLNEANAMYEEMVLKLKSAGVGGIQHNALQEADGIIRRSEAGYMDIMETPIPSTCRITIRAHDGGCGSIIFQHNTDKLISGGQDQTVKIWSAHTGALTSTLQGCLGSVNDLAVTNDNKFVIAACSSNKLFVWEVNGGRPRHTLTGHTKNVSSVDASWVKSCVLASSSNDHTIKIWDLQSGFCKSTIMSGSNANSLAFIDGVTLCSGHRDGHLRLWDIRSAKCTSQTFAHLDVSSVSVSRNRNFILTSGKDNVHNLFDPRTMEVCGKFKAMGNRVVSSWGRPCISPDENSIAAGANDGSVYIWSRLKKDGVPTILQGHSSSVVSSSWCGLGPLATADKHHIYIWT

SEQ ID NO: 204216 - protein, 70 aa, Oryza sativa
  Clone ID: PAT_MRT4530_99325C.1.pep
MAVAGGILVSGEVLEQWGRMRWGKWLDGALVRPRLGKDKGDGEVDGWESLTNAVDTFRQADMGAMSLDTQ

SEQ ID NO: 204217 - protein, 258 aa, Oryza sativa
  unsure (1)..(258): unsure at all Xaa locations
  Clone ID: PAT_MRT4530_99326C.1.pep
AQAGSPIHKPVHVDVPARNKHRTSIIPGVANGRSTRTCHACVVGPDRRRFLYVWSIVLPNRRSRRAAYPQAWRLISDQRYSARSAYQAFFLGQHPFASGDFLGGLKALLNACSSFSLNFSSXCWTADLLHKCXIDSHLVCSFGVPKLETANHIVLDRVFARXSXHRILSPPDLSNLSPALGSSLQAWWPASRACLPAHLYKGFDYLVLLVSWQLXKGQNSKIFDFSLCXVSVVLSSILQKDRLRSAAGVMSFEDSLGE

SEQ ID NO: 204218 - protein, 131 aa, Oryza sativa
  unsure (1)..(131): unsure at all Xaa locations
  Clone ID: PAT_MRT4530_99327C.1.pep
MARRCSRSARRTESSTQRRRRPRPASPCTTRASRPGWSGRHRRWTGSSPXRRTLWPPPRRAARRTRARPGRTPASARRCPTRRRAPAPSSSPGRTAARRARWRGGRRGSSPPRWCRARSSPCLLPGSAARC

SEQ ID NO: 204219 - protein, 37 aa, Oryza sativa
  Clone ID: PAT_MRT4530_99328C.1.pep
MSNIGPPGEDLRHRISESTQPPQPTKSEPAGAKPPEI

SEQ ID NO: 204220 - protein, 69 aa, Oryza sativa
  Clone ID: PAT_MRT4530_99329C.1.pep
SDISESYDSVYFDDYIFSSDFDSSEEDDEDDDDDDDDDDDDEEDGLSVSINEDMSYEEKDAASDHDSDV

SEQ ID NO: 204221 - protein, 80 aa, Oryza sativa
  Clone ID: PAT_MRT4530_9932C.1.pep
CGLFIPIPGFLGLVALYPPPLLLFFPFLAQVPPLKLFRGTPLHFFCFCLLAPRLSPPGVSFFCSPKRENSTKNVLISKKL

SEQ ID NO: 204222 - protein, 350 aa, Oryza sativa
  unsure (1)..(350): unsure at all Xaa locations
  Clone ID: PAT_MRT4530_99330C.1.pep
VQERETVLPPLGSPWAACTRAGTEGAADRGRLDPVLAELAPTWRLRGCHAGRLEEDDDAGRNGRRTAAASDGVIYGEAGEGEHTGRLHGTRGDEPTARIRRREFDGGGLWRRPPAPREEGNGDETTRVRFIYTRASTKSPEFDSSAGLGGATPSEAGDERRYPTARGVIAPASGRXRGGRRAPGVPFXRVLHTHRLSRCFSDERRRRDRGGQWXRWSEGERERERKGGRLGFIGATMSVWEGXPTLGGQASELALXASGQNGDREDDAGGGXRENGKRRKKGGACLLPIWEKKEEKRGXTRQWEEELCLQPLEACRGGGREGGEGGRERERERERWAEREIGPPNLREAN

SEQ ID NO: 204223 - protein, 186 aa, Oryza sativa
  Clone ID: PAT_MRT4530_99331C.1.pep
MALLHLQRQSPKALLPLRRPYPPRNDKSPGPKTQLGMRSGTTGTVGDASTEACEACSRRLLLTGGVAHWLLLAEGRTLPAGGELGGSAQRRQWRPEEARRQRLEGGAAGDDLPWRPSQRRPDLPRGPPVVPMAPLPAVTSHGTVAPLPCPPRAPPGGDLPRQLGGCGGEKSKRRRCGGYEGKRRKF

SEQ ID NO: 204224 - protein, 119 aa, Oryza sativa
  Clone ID: PAT_MRT4530_99332C.1.pep
DNFKCHTLAQLHNQQTSITQVSSSSYSACFAVGDASTEACEACSRRLLLTGGVAHWLLLAEVAIGSNHLLSAGEDVAGRRGARRLGTEEAVATGGGRRDWREARLETLMTGRRGARADG

SEQ ID NO: 204225 - protein, 55 aa, Oryza sativa
  Clone ID: PAT_MRT4530_99333C.1.pep
CSYGPYRNLSVWCMLIHLITQLLQPKETIYPIPGRHLMCIVWNVKPNAPNQNLYY

SEQ ID NO: 204226 - protein, 96 aa, Oryza sativa
  Clone ID: PAT_MRT4530_99334C.1.pep
MERPSTPDSGWVILSTIAVAGRRHSNNGSTAINWHHQERKHHRSSSDMNPALFPTIVCEAGDALLPSVNVRSEPYCRSDDRATTSYTACRRGDACP

SEQ ID NO: 204227 - protein, 93 aa, Oryza sativa
  Clone ID: PAT_MRT4530_99335C.1.pep
GLFRRPKKQHGSGPPNRKRGKQGTFIGRQLPTGEEMLREKILPPNPLKVMLPGQQRVYQGGSWGVLNPQRPPERVGKQHLPLNIKGGEGGLGI

SEQ ID NO: 204228 - protein, 1074 aa, Oryza sativa
  Clone ID: PAT_MRT4530_99336C.1.pep
MYGSDDGEDDSEIAAAKWVRSKKVIPCQWVKIPKKEKYDFDITKADKIFDLLLREKQIQLPAGHTIPSAEELGKKRYCKWHNSGSHSTNDCKVFRQQIQVATEGGKIRFDDSKKPMKVDAGQTADRIRAKGFQVNSAKIINKYQRKFFWNEGMRLPSIENCPGCSDIIESSSRSYNKGNRLRQARLPIHQRLGPMNQDHGQEDEVIRKNQWCPSGIFTKNQKRRVQRLRNRERLQEVEQEINHRLRKPKPRQEWRVKNQVPVADDAAADEAKRKLDRNAEDLIKTNMVLKYFGGNPSETKGVLNVELTVGSKTIPTTFFVIDGKGSCSLLLGRDWIHANCCIPSTMHQCLIQWQGDKIEIVPVDSQLKMENPSYYFEGVVEGSNVYTKDTVDDLDDKQGQGFMSADELEEINIGPSDRPRPTFISKNLSPEFRTKLIELLKEFRDCFAWEYYEMPRLSRSIVEHRLPIKPGVRPRQQPLRRCKADMLEPVKAEIKRLYDAGFIRPCRYAEWVSSIVSVIKKNGKSKEVEDHIADLRKVFERTKKYGLKMNPTKCVFGVSAGQFLGFLVHERGTEVTQRSVNAIKKIQPLENKTELQEMIGKISNLSGRLRHYLLSNECTVICKADVVRYMLSAPILKGRVGKWIFSLTEFDLRYESPKAIKGQAIADFIVEHRDDSIGSVEIVPWTLFFDGSVCTHSCGIGLVIISPRGACFEFAYTIKPYATNNQAEYEAVLRGLQLLKEVEADTIEIMGDSLLVISQLAGEYECKNDTLMVYNEKCQELMKEFRLVTLKHVSREQNIEANDLAQGASGYKPMIKDVKVEIAAMTADDWRKLRYKALKYTLLDGELYYQTIDGVLLKCLSADQAKVAIGKVHEGICANGQAEASNKSLIKLIKRKISDYPRQWHTRLAEALWSYRMACHGSIQVPPYKLVYGHEAVLPWEVRIGSRRTELQNDLTADEYYNLMADEREDLVQSRLRALAKVTKDKERVARHYNKKVVPKDFSEGELVWKLILRIGTCDSKFGKWSPNWEGPFQIHKVVSKGAYMLQGLDGEVYGRALNGKYLKKSYPSVWVNA

SEQ ID NO: 204229 - protein, 184 aa, Oryza sativa
  Clone ID: PAT_MRT4530_99337C.1.pep
MAILPLSISHSLTSALSATSSGIGRPVARLLHPRVPSRPTVICLAAPPKVPVPIASPASLGDDPSKWDPAECDALLRGGEQVASVLQEMLKLMEDMEMDGSFESLAVELIAQGVIGKRVDEMESGFLMALDYMIQLAEKDSDNERKSLLEVVKQTVLDHLTKKCPPHVQVVGLLCQTEKRIADM

SEQ ID NO: 204230 - protein, 263 aa, Oryza sativa
  Clone ID: PAT_MRT4530_99338C.1.pep
WVEAIPLKKVDSGDAIQFVQEHIIYRFGIPQTIITDQGSIFVSDEFVQFADSMGIKLLNSSPYYAQANGQAEAFNKSLIKLIKRKISDYPRQWHTRLAEALWSYRMACHGSIQVPPYKLVYGHEAVLPWEVTIGSLRMESQNDLTADEYYNLMADEREDLVQTRLRALAKVTKDNERIAWHYNKKVVPKDFSEGELVWKLILPIGTRDSKFGKWSPNWEGPFQIYKVVSKGAYMLQGLDSEVYGRALNGKYLKKYYPSVWVNA

SEQ ID NO: 204231 - protein, 66 aa, Oryza sativa
  Clone ID: PAT_MRT4530_99339C.1.pep
DAVEEVMVTAVPATPADVCLAPSEAAVDGEGTLSSDSGRRRPQWQLWTATTMPEVFPPSAQLFMES

SEQ ID NO: 204232 - protein, 449 aa, Oryza sativa
  Clone ID: PAT_MRT4530_9933C.1.pep
HKEMYTVSSPPIVLLSLVQATRKGSTSTIAERTYTDDDVVGGQAATGPGKYAVILDAGSTGTRVHVFRFDRMMDLLKIGDDIELLLQVVPGLSSYAGRPREAANSIQPLLDKAIHVVPNWLMKKTPLKLGATAGLILIGDEKANQILEAVRDVVHTKSKFQYNPNWINVLTGSQEGSYMWVALNYLLDRLGEDYSKTVGVIDLGGGSVQMAYAVSSSIAANAPEVPNGQDPYITEEYLKGRDYNIYVHSYLHYGAQASRVEILKRKNGPFSNCMLRGFKGKFTYNGEQYEAMAAPQGADYHKCRQDVVKALNLDSPCETKNCSFNGVWNGGGGVGQDEIYVTSSFYYIASEIGFIDSEAPSAKSTPAAYKAASEKVCILSIEEAKAAYPIARDHAYLCMDLIYQYTLLVDGFGLDPNKKIMLVNKVKHGEYYIDAAWPLGTAIEAVSPK

SEQ ID NO: 204233 - protein, 982 aa, Oryza sativa
  unsure (1)..(982): unsure at all Xaa locations
  Clone ID: PAT_MRT4530_99340C.1.pep
MPIDPEKFTPEQKAEFEATLQQARDQFLNSFMQTHEGTLVQKYKIKVVTDSPGTGSSKDGEVKQAPGGSAQPSTKGATDGSPSDQGDNSQGVHGVQGDGAQEPQGGNLNQNSELAQDFFNNFQDRVDYAVHHALINQSGVLVNTLSNMMKTIVDGSIAEHQAAGPVYLHGVQQQPIQQTPPIQPVVQPIQQQPQGAAQQRPWADVIADVMREQFGLKPKETGSLYRQPYPEWFERVPLPNRFKVPDFSKFSGQEGVSTYEHINRFLAQCGEASAVDALRFRLFRLSLSGSAFTWFSSLPCGSINSWADLEKQFHSYFYSWVHEMKLSDLTAIKQRHDEPVHEYIQRFREMRNKCFSLSLTDAQLADLAFQGMIPPIREKLSSEDFDSLSHLIQKITLHEHRSAEVRRSSKKVNHVCPYMYGSDDEEDDSKIAAAEWVRSKKVIPCQWVKSFGKEEKYDFDITKADKIFDLLLREKQIQLPVGHTIPSAEELGKKRYCKWHNSGSHSTNDCKVFRQQIQVAIEGGKIRFDDSKKPMKVDGNPFPVNMVHTAGQAADRVRAKGFRVNSARIIXSIRGSMTSSRRSIMKNTTMVLILIGVVSSLDSVGTKXMRLPSIENCPGCSDIVESSSRSYSRADEAKRLAKXKNVVAAPINMVFTLPAEFGIDQADVDEVEERSAKLVLSPEQAEFEKPEGTGNRHLKPLYINGYVNGKSMSKMMVDGGAAVNLMPYATFKKLGRNAEDLIKTNMVLKDFGGNPSETRGVLNVELTVGSKTIPTTFFVIDGKGSYSLLLGRDWIHANCCIPSTMHQCLIQWQGDKIEIVPADSQSKMENPSYYFEGVVEGSNVYAKDTVDDLDDKQGQGFMSADELEEIDIDPGDRPRPTFISKNLSPEFRTKLIELLKEFRDCFAWEYYEMPGLSRSIVEHQLPIKPGVRPRQQPPRRCKADMLEPVKAEIKRLYDAGFIRPCRYAEWGSSIVRVIKKNG

SEQ ID NO: 204234 - protein, 109 aa, Oryza sativa
  Clone ID: PAT_MRT4530_99341C.1.pep
ASSSKSARRAAAGAPQPSGAAWSGLPSDSGPSGLPSDSGPTGPDRVTRADWTRRPSGPRRGGRPSGPRPTGPSGKEAEWPSGEEGADGPRQAATYAGGWSGGPCPPRGR

SEQ ID NO: 204235 - protein, 1130 aa, Oryza sativa
  unsure (1)..(1130): unsure at all Xaa locations
  Clone ID: PAT_MRT4530_99342C.1.pep
LQDQINWHVSIPGGEFWTCTGTKRISQASCFSSTRFWHAXVGPDKKSEPRQQFFSMEEKPPASPSSASPGSVKEKIQQLGLSEVNESNIVTITPDKLTPDQKKXFEAMMQXARNQFLSSFMQTRKRTVVQKYKVKVVADVPRTGSSKDGEVKQAPDGSAQPSDKGATYGSQGNQGDNSQGVQGVQGDGAQGVQDQVDYVVHHALINQSGILTNTLASMVKSMVDGSMAEHQATGPVYLPGGGFPNYRPLITDNQPVVQSIPHNAPSAQLTAPVSAPAPPAAPSAPGQLVNPRLLVREXPQHSGQNVNRLTQDXVASMFLPPQHTVDPTQXSRFSKQRQGSRLCNRVCDTWWSACAACCKSSCPGAFGSSCTTRWHDVMKEQFGLRPKVARNLYXQPYPEWFERVPLPNRFKVPDFSKFSGQDSTSTYEHVSRFLSQCGEASAMDALRVMLFWLSLSGSAFTWFSSLPYGSINSWADLEKHFHSYFYSGVHEMKLSDLTAIKQRHDEPVHEYIQRFREMRNKCYSLSLTDAQLVDLAFQGMIAPIREKFSSEDFESLSHLTQKVTLHEQRFAEARKNSRKVNHVCPYXIYVYIYGSDDGDDDSKIAALEWVRSKKVIPYQWVKNSRKEERYDFDITKADKIFDLLLREKQIQLPAGHTIPSAKELGKKRYCKWHNSGSHTTNDCKVFRQQXQAAIEGGKIKFDDSKRPMKVDGNPFPVNMVHTAGWTADGGRARGFQVNSAKIINKYQRKYDKQQEKHYEEGDEGIRLPSIEDCPGCSDIAESSSRLYSRGNRLRQTMVPVHQRLGPVNQGRGQEDNENRKTQWCPSGIFTKNQKRRKTKPRQEWRVKNQVPVADEATDDEARRLAKXKSVVTASVNMVFTLPVEIGIKQADVDKIEDESAKLILSPEQAVFEKPEGTEHRHLKPLYIDGYVNGKPMSKMMVDGGAAVNLMPYTTFRKLGRNAKDLIKTNMVLMDFGGNPSETKGVLNVELTVSNKTIPTTFFVIDGKGSYSLLLGRDWIHANYCIPSTMHQCLIQWQDDKIEIVPADSQLKMENPSYYFEGVVEGSNVYTKDTLDDLDDKQGQGFVSADDLEEIDIGCHRAARALTALPAWVPCAGSSSSSRPAYFLSLP

SEQ ID NO: 204236 - protein, 272 aa, Oryza sativa
  Clone ID: PAT_MRT4530_99343C.1.pep
MREQFGLKPKETGSLYRQPYPEWFERVPLPNRFKVPDFSKFSGKEGVSTYEHISRFPAQCGEALAVDALRVRLLRLSLSGSAFTWFSSLPYGSINSWADLEKQFHSYFYSGVHEMKLTDLTVIKQRHDEPVHEYIQRFREMRNKCFSLSLTDAQLADLAFQGMIPPIREKFSSKDFDSLSYLIQKVTLHEHRSAEVRKSSKKVNHVCPYMYGSDDKEDDSEIAATEWVRSKKVIPCQWVKSPGKEKKYDFDITKAYKIFDLLLREKQIQLPT

SEQ ID NO: 204237 - protein, 55 aa, Oryza sativa
  Clone ID: PAT_MRT4530_99344C.1.pep
AAGIGTRPPFFFFFFFFFFFVIDILIERFSSVANNNICLYKKLQKQHRRIMSTTY

SEQ ID NO: 204238 - protein, 901 aa, Oryza sativa
  Clone ID: PAT_MRT4530_99345C.1.pep
MALILIGVASFLDFVGMKNQKRRVQRLRNRERFQEVEQEINHRLKKVKPWQEWRVKNQVPIADEAAADEAKRLAKGKSVVTASINMVFTLSADFGSKQADVDEVEEELAKLILSPEQAIFEKLVGTKNQHLKPLYINGYVNGKPMSKMMVDGGAAVNLMPYATFRKLGRNAEDLIKTNMVLKELCGNPSETKGVLNVELTVGSKTIPTTFFVIDGKGSYSLLLKEIDSCQLCDRIEIVPADSQLKMESPNCYFEGVVEDSGVYVKDIMDDLDDKQGQGFMSADDLEEIDIGPGVRPHQQPPRRCKADMLEPIKAEIKRLYDAGFIHPCRYAEWVYSIVPVIKKNGKVRVCIDFRDLNKSTLKDEYPMPVADQLVDAASGNKILSFMDGNAGYNQIFMAEEDIHKIAFRCPGAIGLFEWVLMTFGLKSAGATYQRAINYIYHDLIGWLVEVYIDDVVVKSKEIEDHIADLRKFLGFLVHERRIEVAQRSVNAIKKIQPPENKTELQEMIGKINFVRRFISNLSRRLEPFTPLLRLKADQQFTWGEEQQKGLDNIKEYLSSSPVLIPPQKGIPFRLYLSAGRVGKWIFSLTEFDLRYESPKAIKGQAIADFIVEHRDDSIGSVEMVPWTLFFDGSLSMKQLLKEVEADAIDIMGDTLLVISQLAGEYECKNDVLIVYNEKCQELMKEFRLVTLKHVSREQNIEANDLAQGASGHKPMIKDVKVEIAAMTIDDWRYDVHQYLQNPSQSASRKLRYKALKYAVLDDELYYRMIDGVLLKCLSADQAKVAIGEVHEGICGTHQSAHKMKWLLRRAGYFWPTMLEDCFRYYKGCQDCQKIGAIQRAPASAMNPIIKPWSFRGWGIDMIGMINPPSCKGHKFILVATDYFTKWAEAIPLKKVDSRNAI

SEQ ID NO: 204239 - protein, 214 aa, Oryza sativa
  Clone ID: PAT_MRT4530_99346C.1.pep
KVALHEQRYAEARRNSRKVNHVCPYIYGSDDEDDDSEIAVAEWVRSKNVIPCQWVKSSGKEERYDFDITKVDKIFDLLLREKQIQLPAGHTISSAEELGKKRYCKWHNSGSHTTNDCKVFRQQIQAAIEGGKIKFDDSKRPMKVDGNPFPVNMVHTAGRTADRGRVRGFQMNSAKIINKCQKKYDKQQEKHHEEDDDGFDPHWGCEFFRFCWNE

SEQ ID NO: 204240 - protein, 105 aa, Oryza sativa
  unsure (1)..(105): unsure at all Xaa locations
  Clone ID: PAT_MRT4530_99347C.1.pep
TDVQPSTXAVPSVAPTSQPTALASTPLPVLSAMAPDQPVNPRLLMREQPQHGGQVANRLTQDQVAATFLPPQPVQQTPPMQQPLQPIQQTPLRQQIVQPIQHQGS

SEQ ID NO: 204241 - protein, 2009 aa, Oryza sativa
  unsure (1)..(2009): unsure at all Xaa locations
  Clone ID: PAT_MRT4530_99348C.1.pep
LQNQINWHANTSEGEFWTCTGVKQISQATCFLSTRFWHAQWDLXEVRRQFFLMAEKQAPPPSSPGSIKGKALKPGLTDIIDDNVMPINPEKFTPEQKQEFEAMMQQARDQYLSSFMQTRKGTLVQKYKINVVADSPGTGSSKDGEVKQAPEGSAQPSNKGATDGSLGNQGDNPQGVHGAQGDAAQGFQDRVDYTVHHALINQSGVLVNTLSNMMKTIADGSIAKHQATGPVYLQGGVFPNYRSLVIDVQPAVQAVPSIAPTTQPTAPTSTPLPATSAMALGQPMNPRLLMREHPQPTGQIANPPTHDQVAAMFLPPPPIVDPVQXSRFSRHYQSSQLYSRSNNTWWATCAAICKPSCLRAFGSPCTAGWHDVMREQFGLKPKETRSLYRQPYPEWFERVPLPNRFKVPDFSKFLGQEGVSTYEHISRFLAQWGEASAVDALRVWLFRLSLSGSAFTWFSSLPYGSINSWADLEKQFHSYFYSGVHEMKLSDLTAIKQRHDEPMHEYIQRFRKMRNKCFSLSLTDAQLADLAFQGMXPPIREKFSSEDFDSLSHLIQKVTLHEHRSAEVRKSSKKVNHVCPYMYGSDDEEDDSEIAAAEWVRSKKVIPCQWVKSPGKEEKYDFDITKADKIFDLLLREKQIQLPAGHTIPSAEELGKKRYCKWHNSRSHSTNDCKVFRQQIQVAIEGGKIKFDDSKKPMKVDGNPFPVNMVHTAGQATDRDHAKGFQVNSAKIINKYQRKYDKQQERRYEEYDDGMRLPSIENCPGCSDIIESSSRPRNRDDRLRQTRLPVHQRLGPMNQDRGQEDEVIRKNQWCPSGIFTKNQKRRKPKPRQEWRVKNQVPVADDAAANEVKKLAKGKSVIAAPINMVFTLPPEFWIDQADVDEVEEESAKLVLSPEQAVFEKPEGTENRHLKPLYVNGYINGKPMSKMMVDGGAAVNLIPYATFRKLGRNAEDLMKINMVLKDFGGNPSETKGVPNVELTVGSKTIPTTFFVIDGKGXYNLLLERDWIHANCCIPSTMHQCLIQWQGNKIEIVPADSQSKMENPSYYFEGVVEGSNVYAKDTVDDLNDKQGQGFMSANDLEEIDIGPEFRTKLIEFLKEFRDCFAWEYYEMPGLSRSIVEHRPGVRPRQQPPRRCKADMLEPVKAEIKRLYDAGFIRPCRYAEWVSSIVPVIKKNDLNKATPKDEYPMPVADQLVDAASGNKFLSFMDGNAGYNQIFMAEGDIHKTAFRCPGAIGLFEWVVMTFGLKSAGATYQRAMNYIYHDLIGWLVEVYIDDVVVKSKEVEDHIADLRKVFERTRKYGLKMNPTKCAFGVSAGQFLGFLVHERGIEVNQRSVNAIKKIKPPENKTELQEMIGKINFVRRFISNLSGRLEPFTPLLRLKADQQFTWGAEQQKALDNIKEYLSSPPVLIPPQKGILFRLYLSAGERSIGSVLIQELEGKERVVFYLSRRLLDAETRYSPVEKLCLCLYFSCTRLRHYLLSNECTVICKADVVSYMLSAPILKGRVGKWIFSLTEFDLRYESPKAIKGQAIADFIVEHHDDSIGSVEIVPWTXIFFDGSVCTHGCGIGLVIISPRGASFEFAYTIKPYATNNQAEYEAVLKGLQLLKEVEADTIEIMGDSYLVISQLAGEYECKNDTLMVYNEKCLELMKEFWLVTLKHVSREQNLEANDLAQGASGYKPMIKDVKVEIAAMSADDWRYDVHQYLSNPSQSASRKLRYKALNYTLLDDELYYRTIDGVLLKCLSADQAKVAIGEVHEGICGTHQSAHKMKWLLRRAGYFWPTMLEDLFRYYKGCQDCQKFGAIQRAPASAMNPIIKPWQFRGXGIDIIGMINPPSSKGHKFILVATDYFTKWVEAIPLKKVDSGDAIQFVQEHIIYRFGLPQTITMDQGSIFVSDEFIQFADSVGIKLLNSSPYYAQANGQAEASNKSLIKLIKRKISDYPRQWHTRLAEALWSYRMACHGSIQVPPYKPVYGHEAVLPWEVRIGSRRTELLNGKYLKKYYPSVWVNA

SEQ ID NO: 204242 - protein, 312 aa, Oryza sativa
  unsure (1)..(312): unsure at all Xaa locations
  Clone ID: PAT_MRT4530_99349C.1.pep
MAEKQPPPPSSPGSVKGKALKLGLTDIIDDNVMPIDPEKFTPEQKEEFEATLQQKYKIKVVADSPGTGSSKDGEVKQAPGGSAQPSTKGATDDSPSDQGDNSQGVHGVQGDGSQEPQGGNLNQNSELAQDFFNNFQDRVDYAVHHALINQSGVLVNTLSNMMKTIADGLIAEHQAAGPVYLQGAADSADTTNPGGCTTNPTTGRTTIQXTPPRQQPQQPIQQTPLRQQIVQPIQHPGSVNASAGFTVPGGQPIQQFVNXVILEHLVHHAQPDGTVMPQMVPEHLVRNIQPNLHNYQGGNCHARNSAPEGAGG

SEQ ID NO: 204243 - protein, 94 aa, Oryza sativa
  Clone ID: PAT_MRT4530_9934C.1.pep
MEGGGASAHAGINRVLWTEAEIADRMSEVVDELAADLRALREPDDVVGVATGALLFLADLQRRVDAPLAADLERAETYGDCTECRGRPGITFNL

SEQ ID NO: 204244 - protein, 150 aa, Oryza sativa
  Clone ID: PAT_MRT4530_99350C.1.pep
MSTEKQSPSSASKPPIPPQTKLPKPSGTNLPSTGAKSTVNETNIVPVTGKVVQKYKVKVVAADEVGTSSSQSGKSAADGSGDKGDGLQDGVVEDLCEDGAKIQEEPPRRMNFQDQVDYAVQHALINQSGVLVNTLTNMIKSVIDGTIAEH

SEQ ID NO: 204245 - protein, 86 aa, Oryza sativa
  Clone ID: PAT_MRT4530_99351C.1.pep
ALCDIFITLFCRSRSLTGSNQPEPSNMIAAMPCLGEQTPPVAPKKAKSKTKGKPPCSAVPNSPAMGTRSKNKSPAMGTRSKRKLMD

SEQ ID NO: 204246 - protein, 345 aa, Oryza sativa
  unsure (1)..(345): unsure at all Xaa locations
  Clone ID: PAT_MRT4530_99352C.1.pep
DSCTALTLTFPPDPPPPRAFRRCRSPRAPILPPPDPPPPASPAGRRESTAPARPPGRPPSLPTPHPPPPFPVLFLLKPXRPSSPSPAAGHHHRPPPPINPSALPPLPTPVHRPLPTPRLRWGRPPDPPPTAGLPPPTAITLKAANSPLFPLPLPPPPPLPPLSPLTPPXPPAAPSSXPPTPPXPLPRLPPLTLPXPLPPLPPPTSPHAAPSSLAKPSPPPLSSSSQSPPPPSQPPGSTHRSSAASSPIPQNAVHQRKDGGPGGDRRRRVPAAASSFRRRSFRSPVHVLYLRRRRRRQAFAPHVEANRGRVHHSPLPSDAIAVDLWSTGCILAKLACLQVDSRGSP

SEQ ID NO: 204247 - protein, 230 aa, Oryza sativa
  Clone ID: PAT_MRT4530_99353C.1.pep
MPRPSRPSMTTADALGTPSSRRGAEEHGGCPGAPAWGRGRKAAPAWARGDGACRPGATGRRADGAPARLGGGDGYGEARRRQRRAARVRVRLACGKNRERAGEERMRVELKIEQGQISHFHTWVSYISNNIFSGIEVKDSIVDLSSPSASTRLSARTCSFANDTSSSVDSQRPTASPTREAVQGTPLSTPLEHSPARQRRCCSSLRPLASAAAPTPVVPLTTATVEGEKK

SEQ ID NO: 204248 - protein, 52 aa, Oryza sativa
  Clone ID: PAT_MRT4530_99354C.1.pep
MAERSLLASCQQAATLLAFWDTSGSFGTKGFKNFEEIQSYGKLSTKALSSKK

SEQ ID NO: 204249 - protein, 105 aa, Oryza sativa
  Clone ID: PAT_MRT4530_99355C.1.pep
VHLRAAEFLTLALASASPPWPTPPRPRSRSPPWDPPAPTTTKGGDRPGEKNEVLRQPSGVRRVPVHGSCGWGEGDVAILSRRRRELTSSAPFYEPLTERPVILYN

SEQ ID NO: 204250 - protein, 155 aa, Oryza sativa
  unsure (1)..(155): unsure at all Xaa locations
  Clone ID: PAT_MRT4530_99356C.1.pep
FFFFSLGIYSFFFLFIVLFPSIPILSLHAHXGSPSSIQSITQGSSQLQHYHQYXGPQVHAPARRPCXAVRYATNRXHATMQGTQQHSPCTTQQXTPFAHHVIPWLSIPRMSWQCSITQHXSGNTXMQSTAHQAITVPRHTQAHQPLSIAHSTAFT

SEQ ID NO: 204251 - protein, 47 aa, Oryza sativa
  unsure (1)..(47): unsure at all Xaa locations
  Clone ID: PAT_MRT4530_99357C.1.pep
KMRSNLXPRGLIATCEVVKTINQLLPWSLVRWNKVQSSRHIHSHPTG

SEQ ID NO: 204252 - protein, 593 aa, Oryza sativa
  Clone ID: PAT_MRT4530_99358C.1.pep
MALAGLPLSVFAIAVHFCLVFSSSSSPPVCPANGHRDRTAYHFQPAKNWQNGPVYYNGMYHLFYQYNPHGALWDVGNLSWGHSVSGDLVNWAALDNALDPTAPFDANGCASGSVTILPDGVPVVMYSGIDARRRQVQNVAFPKNPRDPLLREWTKPGYNPVIPVPADVSPDNFRDPTTAWLGSDGLWRFAISAVADGVGATLVYRSADFLRWERNAAPLHASRDAVMAECPDLFPVAEHGEDGLDLDASAIGGAGAGVRHVLKVSMPDTLEDYYMVGRYDDADDTFTVPPEDLEAHGDDYRRWRRIDHGHLYASKTFYDAGKKRRVLWAWVNESDSEADDVTKGWSGLQSFPRAVWLDEGGRQLVQWPVEEIETLRRKRGVLLGGNEVEAGGLREIGGIAGSQADVEVAFEIASLAGADRLEPDHLRDPDALCGENGAAVHGGIGPFGLLVMASGDLRERTAVFFRVFRLSHGYTVLMCTDLTRSTSRAGVYKPSHGGFVDIDIEKDRAISLRTLIDHSIVESFGGGGRTCMTARVYPEHVATGSSHLYVFNNASDAVKVSKLEAWELATASVNAGDDGLISYGGPVCAAQVQ

SEQ ID NO: 204253 - protein, 46 aa, Oryza sativa
  unsure (1)..(46): unsure at all Xaa locations
  Clone ID: PAT_MRT4530_99359C.1.pep
MSSSTFSGDETAPFFGFLGAASALVFSCMGAXYXTAKSDVGVASMG

SEQ ID NO: 204254 - protein, 74 aa, Oryza sativa
  Clone ID: PAT_MRT4530_9935C.1.pep
GQAPRKIQKILSREKKKKRWEKPGSLIKKPPPWGPPFGRAPLKKKKKGGGTQFFFEWKGFLEKFCLAVAWPKKG

SEQ ID NO: 204255 - protein, 63 aa, Oryza sativa
  unsure (1)..(63): unsure at all Xaa locations
  Clone ID: PAT_MRT4530_99360C.1.pep
FXFFFFFFFFVQMLFRFHGTNKGVPPGMLHIICYGKTLTQQNYRRQSTPHRSHSSSNRMNGPA

SEQ ID NO: 204256 - protein, 118 aa, Oryza sativa
  Clone ID: PAT_MRT4530_99361C.1.pep
MGQGKEKKQKHYIKTVFEITEDIGGVFQPRLELTFLQLGVKTGVSILGPTNALIPSPVTPQSDTAVQRHLTGACRRENGVNRFLRNRDLGCSSEQPENATDDTDEETPTTAAAAEPTN

SEQ ID NO: 204257 - protein, 209 aa, Oryza sativa
  Clone ID: PAT_MRT4530_99362C.1.pep
MSKMAEEKVLAAPATVDGGMQSSGDLQASSAAAARVRPVETLLRAAPLGLCVAAMAIMLRNSVTNEYGTVSYSDLGGFKYLVYANGLCAAYSLASAFYIAVPRPATLSRSWVVFLLDQVFTYLILAAGAASAELLYLAYNGDKEVTWSEACGVFGGFCRQARTSVAITFASVACYILLSLISSYRLFSAYDPPQPSLGNKGVEIAAFPR

SEQ ID NO: 204258 - protein, 83 aa, Oryza sativa
  unsure (1)..(83): unsure at all Xaa locations
  Clone ID: PAT_MRT4530_99363C.1.pep
LDLTTTTSIPPYCFVPFGGGPRMCPGNEFARTEILVTMHXLVRQFRWKLCCEEEGYRKDPVPIPVLGLPIELETRSPPEYAHA

SEQ ID NO: 204259 - protein, 233 aa, Oryza sativa
  Clone ID: PAT_MRT4530_99364C.1.pep
MAEEKVLAAPATVDGGMQSSGDLQASSAAAARVRPVETLLRAAPLGLCVAAMAIMLRNSVTNEYGTVSYSDLGGFKYLVYANGLCAAYSLASAFYIAVPRPATLSRSWVVFLLDQRMEIPEISDVLEISFPNFRYVCVELTEVFTYLILAAGAASAELLYLAYNGDKEVTWSEACGVFGGFCRQARTSVAITFASVACYILLSLISSYRLLSAYDPPQPSLGKKGVEIAAFPR

SEQ ID NO: 204260 - protein, 322 aa, Oryza sativa
  unsure (1)..(322): unsure at all Xaa locations
  Clone ID: PAT_MRT4530_99365C.1.pep
ERAGDAEARRGAAGGCLDLIRGPCVRPLFGWSHEAVPDVAKDIRARDAAIKEIANKXNRHCSGCVXAADSAAQKKYEQRRLLCSVSERLRQAMERQMEXSMLKLRQSEEKVISLSKEKDQLLKERDAALQEAHMWRTELXGKARXSKSVIQEATIARADEKVRASEADAAARIKEAAEKLHAVEKEKEELLSLVGILQSQVQREQSSTKQVCEERSESCSGTDNSPPLTKHVDASDDDVDKACVSDSRSVLVSNDNTEVQLAVDGVDIRPIGDAEWGSFQQSEALIADVREVSPESEGGSLDIPVVNPPPVSDHIQGGATHP

SEQ ID NO: 204261 - protein, 311 aa, Oryza sativa
  unsure (1)..(311): unsure at all Xaa locations
  Clone ID: PAT_MRT4530_99366C.1.pep
MGENAQGSGRRPFGDLTNVLGKRPAPSNLEKSAGGIKIVRVEKAVEPRKEFDETAKASGGATRNTLPLFDSIAKENLMRPSIFRETKMQHMAAEAAVLLSKESDDMRSCAMSLGSSGLHDKEQESSLESEGGCEEDDDDDMDSEYLAYTRDSTKTATNDGECLTQEEMAGSSGNQKPLSSLDFTTGCDDMPCSDVHHHSLGNSELENDDTTKSCACSFCLKALKKSIKFARLLGKRSQGDEYSVNAGRYNLKRAAEMEFELYQQQRSLFLHTENVLIRESAQLHSSLVKLKXXRENCKTDLETASSSLLGK

SEQ ID NO: 204262 - protein, 252 aa, Oryza sativa
  Clone ID: PAT_MRT4530_99367C.1.pep
MRPSIFRETKMQHMAAEAAVLLSKESDDMRSCAMSLGSSGLHDKEQESSLESEGGCEEDDDDDMDSEYLAYTRDSTKTATNDGECLTQEEMAGSSGNQKPLSSLDFTTGCDDMPCSDVHHHSLGNSELENDDTTKSCACSFCLKAAFMWTDLHYQDTRGRLAALKKSIKFARLLGKRSQGDEYSVNAGRYNLKRAAEMEFELYQQQRSLFLHTENVLIRESAQLHSSLVKLKEFRENCKTDLETASSSLLGK

SEQ ID NO: 204263 - protein, 115 aa, Oryza sativa
  unsure (1)..(115): unsure at all Xaa locations
  Clone ID: PAT_MRT4530_99368C.1.pep
PHIPTGLFKYKGISRPPLEGGRSHILGAPCQPKPLLRGARLGANNPFPARGXKPPLHGEKPLKSGAHGDPRTAILLVETPNASGGRPMSIPPAVARANSGVIVRLVWVGWVWPFS

SEQ ID NO: 204264 - protein, 91 aa, Oryza sativa
  Clone ID: PAT_MRT4530_99369C.1.pep
VTPPPPPGLKKKPFSPPLLFFLKRTWSFGAPPVIFLASFSQLLACVGPYPLCFVVPTNALARCGFFSLFCPYAPPPEVVMWPPVFSPSVYA

SEQ ID NO: 204265 - protein, 111 aa, Oryza sativa
  Clone ID: PAT_MRT4530_9936C.1.pep
AQWKKMLRRRRNPREVARVDVKEVVDRIGSTFSSSCVLLIVLPHRSAPQSSGTSTGSMTRASKARRTPIRISIRSSCTLSCNPKTHFRSTCQQRPLAERIDQPDIHKDHIG

SEQ ID NO: 204266 - protein, 1996 aa, Oryza sativa
  unsure (1)..(1996): unsure at all Xaa locations
  Clone ID: PAT_MRT4530_99370C.1.pep
LQDQINWHANIPEGEFWTCIGVKQISQASCFTSTRFWHAWWDXXEVSKQFFLMAEKPPLSPSSVSLGIVKEKIQKLGLTDVNEGNVVPIDPEKFTPDQKKDFDAMMQQARDQFLNSFMQTRKGTLVQKYKVKVVADDTGTSSSKGEDGKQALDGXGATDGSLGGQGDNSQGVHGVQGDGAHGVQDRIDYVVHHALINQSRVLVNTLSNMMKSIADGSIAEHQAAGPVYLQAGVFPNYRPLITDAQPSIQAVPPIVPSAQPTAPASTPLSTPSALAPGQLVNPRLLIREQPQHSGQVANRLMQDEVAATFLPPQPTIDPIQXSRFNRHPRFNRLYNQVCDAWWTACTTIFKSSCPRTLGSPRIAGWHDVMREQFGLKPKETISLYRQPYPECFERVPLPNRFKVPDFSKFSGQDGVSTYEHISRLLAQCCKASVVDALRVRLFRLSLSGSALSWFSSLPYGSINSWADLEKQFHSYFYSGVHEMKLSDLTVIKQRHDEPMHEYIQRFREMRNKCFSLSLTDAQLANLAFQGMIAPIREKFSSKDFDSLSYLIQKVTLHEHRSVEARKCSKKVNHVCPYIYGSDDDEDDSEIATAEWVRSKNVISCQWVKRSGKEERYDFDINKADKIFDLLLREKQIQLPAGHIIPSAEELGKKRYCKWHNSGSHMTNDCKVFRRQIQAAIEGGKIKFDDSKRPMKVDGNPFPVNMVHTAGRTADGGRVRGFRMNSAKIINKYQRKYNKQXEKHYEADDDGMRLPSLKDCPGCSDVAENSSRSYGMGSRLRQTRVPIHQRSGPVNQDHDQEDNEIRKNQWCPSGIFTKNXKRRKAKPRQEWRVKNQVPVADEAAADEARKLAKGKSVVTTSINMVFTXDVDEVEEESGKLILSPEQAVFEKLEGTENRHLKPLYINGYVNGKPMSKMMVDSGAAVNLMPYATFRKLGRNAEDLIKTNMVLKDFGGNPSETKGVLNVELTVGSKTIPTTFFVIDGKGSYSLLLGRDCIHANCCLPSTMHQCLIQWQGDRIEIVPADSQLKMESPNCYFEGIVEGSGVYVKDTVDDLDDKEGQGFMSAGDLEEVDIGPEFRTKLIELLKEFKDCFAWEYYEMPGLNRSIVEHRLPIKPGXRPHQQPLRRCKADMLEPVKAEIERLYDAGFIRPCRYAEWVSSIVPVIKKTDLNKTTPKDEYPMPVADQLVDAASGNKILSFMDGNNQIFMAEEDIHKTAFRCPGGIGLFEWVVMTFGLKSAGATYQRAINYIYHDLIGWLVEVYIDDVVVKSKEIEDHIADLKKVFERTRKYGLKINPTKCACGVSAGQFLGFLVHERGIEVTQRSVNAIKKIQPPENKTELQEMIGKINFVRMFISNLSGRLEPFTPLLRSKADQQFTWGAAQQKALDNIKEYLSSPPVLIPPQKGIRFRLYLSAGEKSIGSVLIQELDEKERVVFYLSRRLLDAETRYSPVEKLCLCLYFSCTRLRHYLLSNECTVICKADVIKYMLSAPILKGRVGKWIFSLTEFDLRYESPKVIKGQAIADFIVEHRDDSIGSVEMVPWTLFFDGSVCTHGCGIGLVIISPRGACFEFAYTIKPYATNNQAEYEAVLKGLQLLKEVEADAIEIMGDSLLVISQLAGEYECKNDTLMVYNEKCQELMKEFQLVTLKHVSREQNIKANDLAQGASGYKPMIKDVKVEIAAMTADDWRYDVHQYLRNPSQSASRKLRYKALKYTLLDDELYYRTIDGVLLKCLSADXAKVAIGEVHEGICGTHQSALKMKWLLRRAGYFWPTMLEDCFRYYKGCQDCQKFRAIQRAPASAMNPIIKPWPFRGWEIDMISMINPPSSKGHKFILVATDYFTKWVEAIPLKKVDSGDAIQFVQEHIIYRFGIPQTITTDQGSIFVSDEFVQFVDSVGIKFLNSSPYYAQANGYAEASNKSLIKLIKRKISDYPRQWHTRLAEALWSYRMACHGSIQVPPYKLVYGHEAVLPWEVRIGSRRIELLNGKYLKKYFPSVWVNA

SEQ ID NO: 204267 - protein, 575 aa, Oryza sativa
  Clone ID: PAT_MRT4530_99371C.1.pep
MECGVKMCIVGWPGLAWDELEPRSGCQFGPNHRRPWVKAVHVIKKNGKIRVCIDFRNLNKATPTDEYPMPVAYELVDAASGHKILSFMDGNAGYNQTFMAEEDIHKTTFRRPGAIGSFEWVVMTFGLKSAWATYQRAMNYIYHDLIGWLVQVYIDDVVVKSKEVEDHIADLRKVFERTRKYGLKMNPTKCAFGISAGQFLGFLVHDRGIEVTQRSVNAIKKIQPPKNKIELQEMIGKINFVRRFISNLSGRLEPFTPLLRLNADQQFTWGVEQQKALDDIKEYLSSPPVLIPPQKGVPFRLYLSAAEYEAVLKGLQLLKEVEADAIEIMGDSLLAISQLAGEYECKNDTLMVYNEKCQELMKDFRVKFGAIQQAPASAMNPIIKPWGIDMIGMINPPSSKGDKFILVATDYFTKWVEAIPLKKVDSGDAIHFIQEHIIYRFGIPQTITTDQGSIFVSDEFVQFADSMGVKLLNSSPYYAQANGQAEASNKSLNKLIKRKISDYPRQRHTRLAEALWSYRMACHGSIQVPPYKLVYGHEAVLPCEVRIGSSRTELQDNLTADEYCNLMADEREDLV

SEQ ID NO: 204268 - protein, 156 aa, Oryza sativa
  unsure (1)..(156): unsure at all Xaa locations
  Clone ID: PAT_MRT4530_99372C.1.pep
AFNNITRLTFGKRFIDAAGELXEQGCELKAIVKDGIKIGASVPIAEHIPVLRWLNLVDEELYNAHSARXDRFTRRIMXEHARELERHGAKQHFVDALFTLRDQYDLSDDTVIGLLWDMIAAGSDTAVITAEWAMAELARNPRVQAMAQEKLDRVVG

SEQ ID NO: 204269 - protein, 56 aa, Oryza sativa
  Clone ID: PAT_MRT4530_99373C.1.pep
FLCQNCQGGNMNYQYQPFSPQVQYQQGGLTQPQFASQYNQFEPTQQQSQEAAQQRP

SEQ ID NO: 204270 - protein, 90 aa, Oryza sativa
  unsure (1)..(90): unsure at all Xaa locations
  Clone ID: PAT_MRT4530_99374C.1.pep
SASEQPLAGAFEANREFYIPRFHARHLFDEPPACAATRLHARHLYDKTPLPACSAAMXGSPSKSRGVTGPTHTDDGDWISDDPDEIILKN

SEQ ID NO: 204271 - protein, 179 aa, Oryza sativa
  unsure (1)..(179): unsure at all Xaa locations
  Clone ID: PAT_MRT4530_99375C.1.pep
FDPRHACSHPAVEVTAVRPRQGEEGAGGLPSYAAVEPSEGEPRRCPHAPLRVTDLGXRRGAHCHATSVCAAATVLVGEAHRLDGKARRRRGACMRLRPRPSSPASVPSCPPSSPLPLAVLHQFRPDPLRTCSSAGSRRTPPAATQSDSEEAARFFYSLPLRAVSLPLCLHLPRPWDGPP

SEQ ID NO: 204272 - protein, 78 aa, Oryza sativa
  Clone ID: PAT_MRT4530_99376C.1.pep
FNTIFQGDYYSCVVVGAGDQEPKSPQKKFYLVHSSGLVCQSRSQWRDLASTPFASLCCQSDLREEGDSAAVESGVSPA

SEQ ID NO: 204273 - protein, 182 aa, Oryza sativa
  unsure (1)..(182): unsure at all Xaa locations
  Clone ID: PAT_MRT4530_99377C.1.pep
IVDPVQQQPIQQTPPIQPVVQPIQQQVVQPAQQTPPSQQPLQPIQQTPPRQQPLQPIQQTPLRQQIVQPIXHQGSMNASAGFAAPGSXPIQQFVNQVVPEHLVHHVQPDGTVMPQVVPEHLVRNIQPNLHNYXGGNLSYQYQPPSPQAQYQLGGLAQPQFASQPPSPQAQYQPGGLAQPQFA

SEQ ID NO: 204274 - protein, 505 aa, Oryza sativa
  Clone ID: PAT_MRT4530_99378C.1.pep
MDAAVFCCLLALLPLLHYLITLFLHGSRDSDLRLPPGPWRLPLIGSLHHLFFGALPHRALRDLARRHGPLMLLAFGDAPVVVVASTAGAAREILRTHDDNFSSRPLSAVVKVCTRRGAGITFAPYGEHWRQVRKICRLELLSPRRILAFRAIREEEAARLVRAIGVASPPLVTNLSELLGNYVTDTTVHIVMGERFRERDALLRYVDEAVRLAGSLTMADLFPSSRLARAMSSTTLRRAEAFVESLMEFMDRVIREHLEKKRSCQGGEREEDLIDVLLRLQAEGSLHFELTMGIIRAVIFDLFSGGSETATTTLQWAMAELMRNPGVMSRAQAEVREAYKDKMEVTEEGLTNLTYLQCIIKETLRLHTPGPLALPRECQEQCQILGYDIPKGATVLVNVWAICTDNEFWDESEKFMPERFEGSTIEHKGNNFEFIPFGAGRRICPGMQFGIANIELALANLLFHFDWTLPEGTLHSDLDMTETMGITARRKEDLYVHAIPFVQLP

SEQ ID NO: 204275 - protein, 249 aa, Oryza sativa
  unsure (1)..(249): unsure at all Xaa locations
  Clone ID: PAT_MRT4530_99379C.1.pep
GGKIQFGDFKRLIKVKLGQQPIRARPRGFQVNWGKVFHQISEKVCKHQERHHKEEXDGFIPHEGCEFFRFCXNEGLKLPXSIEDCLGCSDMXKNSSRSYGRGNRLRQTRVPVHQRLGPVNQDHGQEDNEIRKNQWCLSGIFTKNQKRRVQRLRNRECFXEVEQEXNHRLQKTKSRQEWRVKXQVPVADEATAEEAKRLVKGKSVVTASVNMVFTLPAEIGTKQADVDEVEEESAKLILLGLQEYDRSST

SEQ ID NO: 204276 - protein, 125 aa, Oryza sativa
  unsure (1)..(125): unsure at all Xaa locations
  Clone ID: PAT_MRT4530_9937C.1.pep
MVQERSGAGRPPPRRPPARLPRAPPPPRERRRPLPAAYAAGARLLPPRVPPPARGAPPPRRPRRPRXPPARPPTTGLASHLPGRRPRLPRKPPPRPPATGLAGRLPSRPPXPRPPCRRAPPGLTW

SEQ ID NO: 204277 - protein, 263 aa, Oryza sativa
  Clone ID: PAT_MRT4530_99380C.1.pep
MGDWVIGALINIVGSVAINFGTNLLKLGHDQREKLSTTNNNQGNDKFVPKSVMHFQTWRIGILFFAAGNCLNFMSFAYAAQSLLAALGSIQFVSNIAFAYFVLNKTISVKVMVATTFIVFGNIFLVSFGNHQSPVYTPEQLVAKYSNLVFVLYCMSLVFVVAFNQYLYRSGETIISDSAKHTGSHWRTLLPFSYAIVSGAIGSCSVLFAKSLSNMLRLTMSSRYQFHSWFTYSMLLLFLFTAGFWMARLNEGLSLFDAILIVP

SEQ ID NO: 204278 - protein, 342 aa, Oryza sativa
  unsure (1)..(342): unsure at all Xaa locations
  Clone ID: PAT_MRT4530_99381C.1.pep
KLESFTPLLRLKADXQFTWGAEQQKALDNIKEYLSSPPVLIPPQKGIPFRLYLSAGDKSIGSVLIXELEGKERVLFYLSRRLLDAETRYSPVEKLCLCLYFSCTRLRHYLLSNECTVVCKADVVKYMLSAPILXKGRIGKWIFSLTEFDLRCESPKAIKGQAVADFIVDHRDDSIGSVEIVPWTLFFDGSVCTYGCGIGLVIISPRGACFEFAYIIKLYATNNQVEYEAVLKGLQLLQKVEADTIEIMGDSLLVISQLAGEYDCKNDMLLVYNEKCQELMKKFRLVTLKHVSREQNIEANDLAQGVSGYKPLIKDVQIEVAAILADDWRYDVYRYLXRIPIS

SEQ ID NO: 204279 - protein, 179 aa, Oryza sativa
  Clone ID: PAT_MRT4530_99382C.1.pep
MQRLGDFRLPPFFNYPPYFTLQPVRETREKQVQLWKDLILDYCRSQKLYIISLEEDFPLFSNPKIERSLSHEAKEVFLAALVYEGRAEWMDKGHKKCLILWLRIQDWANYILNFVKDNGLEDSVMTVEEIRSGIETRGTELAGIDRGVLMRALKLLEQKGKAAIFKGTSADDEGVKFSA

SEQ ID NO: 204280 - protein, 120 aa, Oryza sativa
  unsure (1)..(120): unsure at all Xaa locations
  Clone ID: PAT_MRT4530_99383C.1.pep
LALGGHGQNGDRXGDAGDGRKKXERKRKRGLASLLLWEKKKGERATWQREEELCLRPLEASARSGGVGLMTTAMTAGRCGAERRHGRQARKSVAEADGGGDQAVGHHGARAREATGGAAI

SEQ ID NO: 204281 - protein, 365 aa, Oryza sativa
  Clone ID: PAT_MRT4530_99384C.1.pep
MATAAEDGCCGGGARQRQSEVEAKMAMLGDGGGGDAAQRMDGGQIRVPDNMESGSGRRRPEEAPRSGGARRRWGPRRRWLLASPTATALGDADATATEVDAAAAAEAEAAARGERGDGGGDGGGRAGGRGRARDEREKGAAADRWQGDKIEIVPADSQLKIENPSYYFEGVLEGSDVYNKDTIDDLNDKQGQGFTSADDLEEIDIGLGDRPRPTFIRVRPHQQPPRRCKADMLEPVKTEIKRLYDAGFICSCRYAEWVSSIVPIIKKNGKVRVCIDFRNLNKATPKDEYLMPVADQLVDAASGHKILSFMDGNAGYNQIFMAEEDIHKTAFRCPGAIGLFEWVVMTFGLKSARATYQRAMNYIYH

SEQ ID NO: 204282 - protein, 592 aa, Oryza sativa
  Clone ID: PAT_MRT4530_99385C.1.pep
MRLKEEPALSLAVVELEIDHAIKSVYIVAPDGIVEPVPVQGDYIVGEDKFYELLGLRAEDEVADEARQAAARGGGPDVAGAAAGGVGGAAAAAAAPGASPVADEDDITGAAIPVDDQVPGERVMAYDPNNSCMKAGTVYPNMKEFRLAMRQFAINAEFELKLVTVLQDLHTCTSSSRRKTTTPTAKWVASNAIPILKKNPGLEKVVHTVFEHAEQRECFWHLMKNFVKRFGGDVHSHIYPAARAYRKEIWQSHTKEVIEACSDVLPWLEAYHPLKWMRSGFNPAIKQDRVLVMVLWNKRRRIAEKMTGNILPAVTQKLKARTRGLGHLSVVKSDSFCAEIVDNSTTHEKHVVKAYNQYCSCEEWQHTGKPCQHALALITSQQNRDVNIEDFVNPYFSVELFRKAYRRIIEPLGDKSYWPQVELPWVLGAPLPKKTNGRYIKLRIKSCLEGGGKSKAKTTPTDNDSGKRVLRKPRRNTTKYGNTSDIPSPKRPTVQTILEESLGRITRSRLASLMKGGAQNIPASNSQPADIPSSSSQPADIRASSSQPTADIGASSSQPAASSSQATSNAAPSWQPRMSPRKKLTPKKKLKT

SEQ ID NO: 204283 - protein, 189 aa, Oryza sativa
  unsure (1)..(189): unsure at all Xaa locations
  Clone ID: PAT_MRT4530_99386C.1.pep
MAPGQPMNPLLLMREHPQHSGQVANRPTQDQVAAMFLPPQHAVDPVQQQPIQQTPPIQQVVKPIQQQVVQPVQQTPPRQQPLQPIQXTPLRQQIVQPIQHQGSISASAGFATPGGQPVQQCLNQVVPEHLVHHVQPDGTVMPQVVPEHLVRNIQPNLHNYQGGNLSYQYQPPSPQAQYQPGGLAQPQFA

SEQ ID NO: 204284 - protein, 1740 aa, Oryza sativa
  unsure (1)..(1740): unsure at all Xaa locations
  Clone ID: PAT_MRT4530_99387C.1.pep
PVEPSPPCKPPPPSLLLNPRLLMREHPQPTGQIANQPTQDQVAAMLLPPPPIVDPVQXSRFSRHHQSSQLYSRVCSTWWATCATICKPGRPRAFGSPCTTGWHDVMREQFGLKPKETGSLYWQPYPEWFERVPLPNRFKVLDFSKFSRQEGVSTYEHISRFLAQCGEASAVDTLRVRLFRLSLSGSAFTWFSSLPYGSINSWADLEKQFHSYFYSGVHEMKLSDLTAIKQRHDEPVHEYIQRFREMRNKCFSLSLTDAQLADLAFQGMIPPIREKFSSEDFDSLSHLIQKVTLLEHRSAEVRKSSKKVNHVCPYMYGSDDEEDDSEIAAAEWVRSXKKVIPCQWVKSPGKEEKYDFDITKADKIFDLLLREKQIQLPTDHTIPSAEELGKKRYCKWHNSGSHSTNDCKVFRXQIQVAIEGGKIRFDDSKKPMKVDWNPFPINMVHTAGQAADRARAKGFQVNSAKIINKYQKKYDKQQERSYEEYDDGMRLPSIENCPGCSDIIESSSRPHNRDNRLKQARLSVHQRLGPMSQDRGQEDEVIRKNQWCPSGIFTKNQKRRKPRPRQEWRVXNQVPVADDAAADEVKRLAKGKSVIAAPINMVFTLPAEFGVDQADLDEVEEESAKLVLSPEQAVFEKPEGTENRHLKPLYINGYVNGKPMSKMMVDGGAAVNLMPYATFRKLGRNAKDLIKTNMVLKDFGGNPSETKGVLNVELTVGSKTIPTTFFVIDGKGSYSLLLGRDWIHANCCIPSTMHQCLIQWQGDKIEIVPADSQLKMENPSYYFESVVEGSNVYAKDTVDDLDDKQGQGFMSADDLEEIDIGPEFRTKLIELLKEFRDCFAWEYYEMPGLSRSIVEHRLPIKPGVRPRQQPPRRCKADMLEPVKAEIKRLYDAGFIHPCRYAEWVSSIVPVIKKNDLNKATPKDEYPMPVADQLVDAASGNKILRFMDRNVGYNQIFMAEEDIHKTAFRCPGAIGLFEWVVMTFGLKSAGATYQRAMNYIYHDLIGWLVEVYIDDVVVKSKEVEDHIADLRKVFERTRKYGLKMNPTKCAFGVSAGQFLGFLVHERGIEVTRRSVNAIKKIQPPENKTELQEMIGKINFVRRFISNLSGRLEPFTPLLRLKADQQFTXVAEQQKALDNIKEYLSSPPVLIPPQKGIPFRLYLSTGEKSIGSVLIQELEGKERVVFYLSRRLLDAETRYSPVEKLCLCLYFLCTRLRHYLLSNECTVICKADVVRYMLLAPILKGRVGKWIFSLTEFDLRYESPKAMKGQAIADFIVEHRDDSIGSVEIVPWTLFFDGSVCTHGCGIGLVIISPRGACFEFAYTIQPYATNNQAEYEAVLKGLQLLKEVQGDTIEIMGDSLLVISQLAGEYECKNDTLMVYNEKCLELMKEFRLVTLKHVSREQNLEANDLAQGASGYKPMIKDVKVEIAAVSADDWRYDVHQYLSNPSHSASRKLRYKALKYTLLDDELYYWTIDGVLLKCLSADQAKVAIGEVHEGICGTHQSAHKMKWLLRRAGYFWPTMLEDCFRYYKGCQDCQKFGAIQRAPASAMNPIIKPWPFRGWGIDMIGIINPPSSKGHKFILVATDYFTKWVEAIPLKKVDSGDAIQFVQEHIIYRFGLPQTITTDQGSIFVSDEFVQFADSVGIKLLNSSPYYAQANGQAEASNKSLIKLVKQKISDYPRQWHTRLAEALWSYRMACHGSIQVPXIEAVLPWEVRIGSRRTELLNGKYLKKYYQSVWVNA

SEQ ID NO: 204285 - protein, 57 aa, Oryza sativa
  Clone ID: PAT_MRT4530_99388C.1.pep
MAGVDPEWSKCAEKTCVGLMAVYIQEKLPDVTRPALGEATATYQRPGRALKEPRCRL

SEQ ID NO: 204286 - protein, 139 aa, Oryza sativa
  unsure (1)..(139): unsure at all Xaa locations
  Clone ID: PAT_MRT4530_99389C.1.pep
TDVQPPVQAVPFVATTTQLTAPASTPLPVQQQVVQPAQLTPPRQQLXQPMQQTPLRQQTVQPIRHPGSINASAEFAAPGGQPXQPDGTVMPQMVPXEHLVRNIQPNLHNYQEGNLGYQYQPPSPQAQYQPGGLAQPQFT

SEQ ID NO: 204287 - protein, 542 aa, Oryza sativa
  Clone ID: PAT_MRT4530_9938C.1.pep
MAAGSIVVDFPSMGAACCFSSLESLLRDSTSRFLAAVSAAPDPDLTNFRSLFSRVLNTYPDPPLEAVWFFSALSFHDNPGDLRSLLHLLSAFTASSRSAAKPLALLAPVVSELYHSAKPRREAEALVEAVLSYISICSSRAAPAAGDGAGAGADAGSLLPAFGELVKVWSVRHSRDRCPFQVLFPLVGEDARRELMREGCSVAFLAGAVVAEAFLLRLCLKVQGAAGASRAELQKELRIWAVSSISVFQNQQFFGFRCSDPIVMTVVLMDFAGVLLNMLVNPPLPVYSLLSADDEILVRDVLYDALILVDYSFINKGAGVDQADSSLLPLYVSRLLITHDAINDARSKGDQGRAMSFMNAFFTSNIPTYFAKCATSQVGFNQLSKPAAITPQALLKWLVDLEDKGFKVFGENVSRIRERLMYDEVKNGYQSRMTHSDADLFFIDKQSGGEVMDTRAGEDEEAVEMETADNAFMAAAQSMKAMANGMRKRKDCGAEDANVVKFVKYKVEDSSVKDYFLSANNGMSSGSEVENPQSDDEMEETD

SEQ ID NO: 204288 - protein, 450 aa, Oryza sativa
  Clone ID: PAT_MRT4530_99390C.1.pep
MQRPSVVEIVGSAVVGEAVGRICSYLISRGEEEVAAGDGAEHDEERMEVALLKIQAAVEEADGWHITNRPLVRWRDKLKRAADEGECVLREYRRRRRRRLCVDDDDARRLWFPRRVARAAGKKLFAFGGGDEQRLSGGTVRRFERLADGVCDFVKLVESGGRAKRFVPFQPVAASLLARRAVSFSVKPPASPGATAHAFAFPDLTSPWRRPRAHVVFLYADGGGTGEKLELFVELDLSESADVMALALSSMDALPPHFRFASAAAFGSFHRLQAMTQDDGGGDHLPAWDAHYCSQPSRYEQPEWMAAGYGDEPASVAALPEHVLYVVAEWDSPARDAPRTTPPPPPPVHVSYHLGRQGADWAVRREEMARRIMDGRFGTRARRVERHVDAGAETFNGVVMCTVDGFRRRSKAAVAVAGQVVRWCFVSGWVVYLSVRGVGAGQPYEVGFQG

SEQ ID NO: 204289 - protein, 45 aa, Oryza sativa
  unsure (1)..(45): unsure at all Xaa locations
  Clone ID: PAT_MRT4530_99391C.1.pep
PRFRNFAEVVKALHEXFAWVSFKTNHNASDSQITRNAFILQSLPS

SEQ ID NO: 204290 - protein, 48 aa, Oryza sativa
  Clone ID: PAT_MRT4530_99392C.1.pep
MRRFSPAGAILLLRQGTRRGTRIRRLELASGGAAAAESCARVTRQGVD

SEQ ID NO: 204291 - protein, 53 aa, Oryza sativa
  unsure (1)..(53): unsure at all Xaa locations
  Clone ID: PAT_MRT4530_99393C.1.pep
MQESGWKPWWFAKDXASGTCRYLGGSWESREKSNWQGCTNIFGQVSNDLMIPS

SEQ ID NO: 204292 - protein, 50 aa, Oryza sativa
  Clone ID: PAT_MRT4530_99394C.1.pep
KQSNLNLIYCLSRMYICPYMYQYVLAQNTHGFKSVKYVYARSQYKTLYML

SEQ ID NO: 204293 - protein, 139 aa, Oryza sativa
  Clone ID: PAT_MRT4530_99395C.1.pep
MADPPPPHHPPCAACAHQGRPSCPAGCPLAPYFPADRPERFEYANLLFGVDGILRRLEAAGPDPGTRRATMASIVFVSDARAADPVHGAYGVIRNLQQELASVKAEIAAIRQKQQQAQPPPPPLDGPPPPPVIFFSSPL

SEQ ID NO: 204294 - protein, 74 aa, Oryza sativa
  unsure (1)..(74): unsure at all Xaa locations
  Clone ID: PAT_MRT4530_99396C.1.pep
CSDFWHRPLWLARRLGSISTRRLVFILCDELRTSXLLFSAFLFFCSAAGLLPFCHGLIVAPLPRQANCCPICGD

SEQ ID NO: 204295 - protein, 642 aa, Oryza sativa
  Clone ID: PAT_MRT4530_99397C.1.pep
MRKEKIPHQAPFAIQAAQLLGRAIGAGLFAITPAGERGMCCKAIKLGNARVFPVTTFARRGRIYLPMDELEMAGLSEDDIFDGRVTDRWRCFMRDQITRARAFFRQAEEGASELNQESRWPVWASLLLYRQILDEIEANDYNNFTKRAYVPKAKKIVALPKAYYRSLMLPSSDSKPEILCPSYSDDILHYLKSGCRCRAVALRVSSPMLAPSAGGASSARHVRELLRRCGSVHRLNQLHAHLVVHGVDDVTSQILASYCALPAGGGVWYARQLFDRIPDPDRFVYNSLIRAYCNSHCPQEALPLLRGMIRRGILPNEFTLPFLLKACARVQAWEHVMVTHGVVVKLGFVGQVFVGNALLHSYASAGSLGDSRRFFDEMVDRNVVSWNSMINGYAQAGNTREACSLFEGMRRQGLLADEFTLVSLLFACSAEGNLEFGKLVHSHLLVRGCRIDLILANALVDMYGKCGDLLMAHTCFDMMPFKNAVSWTSMLCALAKRASIDAARDWFEQIPEKSIISWNAMISCYVQGGRFHEALDLYNRMKLLGLAPDEFTLAAVLSACGQLGDLASGKMIHDCIRDNFHNPGVALFNSLLDMYARCGQVDTAISLFSEMPSKNVISWNAIIGALAMHGRAQDALMFFRSM

SEQ ID NO: 204296 - protein, 457 aa, Oryza sativa
  Clone ID: PAT_MRT4530_99398C.1.pep
MPPGSDSPLLLVRLDLVGFGAAVLRWLRRPRRWRGSGAARVKEAEVDWSLFSSLGGECGERGGGKALTELVRPALAKKATEEDITEFHKINAAFCSSWVEMGEEIKNGEEGPDMAAPGEEEQEQGRKGIPSLLSSREENIASNITQLIGWTPLVEMKNIAKNEGVQARLVGKMEAYQPLCSVKDRSALRMIEDAEEKGLITPGVTTLIEPTSGNLGIGLVLVAVQKGYRFIAVMPAKYSLDKQMLLRFLGAELILTDPAIGFNGMMDKVEELMKSIPNSHCLNQVTNPANPEAHFMWTGPEIWKDTAGKVDVFVASVGSGGTLTGVGRYLKMKNPSINIVCVEPSESPVISGGSPGPHKIQGTGAGFIPEILDKSVIDEVVTVNTEESMAMARRLAKEEGLLVGISSGANVAACIKIADREENKGKMIVTMFPSGGERYMNSDLFAPVREECDNMTF

SEQ ID NO: 204297 - protein, 216 aa, Oryza sativa
  Clone ID: PAT_MRT4530_99399C.1.pep
MEATAAAAAAPARSALPFRSRVAAAARPGRAPALSAAPGRRLVARRAAGDGQAVEAQEALPIEKRFPPFPSVMDINQIREILPHRFPFLLVDRVIEYKGGEYAVGIKNVTINDNFFPGHFPERPIMPGVLMVEAMAQVGGLVMLQPEIGGSRDNFFFAGIDKVRFRKPVIAGDTLIMRMTLTKYQKRFGLAKMEGKAYVGGDLVCEGEFLLVSATE

SEQ ID NO: 204298 - protein, 500 aa, Oryza sativa
  unsure (1)..(500): unsure at all Xaa locations
  Clone ID: PAT_MRT4530_9939C.1.pep
MDPFSKSPDDDDLRPEAEAARRPQPQPQPREWRFAQVFGERAAGEDVQEVDIISAIEFDKSGDHLATGDRGGRVVLFERTDSRDSASRSELERQDYPIARHPEFRYKTEFQSHEPEFDYLKSLEIEEKINKIKWCQTANNALFLLSTNDKTIKYWKVQERKVKRISVMNLNTSQSSGNGTTSSSSSSSSRAILPNGGCSEKLYNFPNNDLLFPPGGCTSLRLPVVVTGQDLNLVPRCRRVYSHAHDYHINSISNNSDGETYISADDLRINLWNLEISNQSFNIVDVKPANMEDLTEVITCAEFHPCHCNTLAYSSSKGSIRRSFFHRDNCIGIRYKICEGCEAPGSRSLFTEIIASISDRKFSRDGRYILCRDKMTLKLWDLNMDSGPVSTFQVHEHLRPKLCDLYENDSIFDKFECCLSGDGLHVATGSYGNLFRVFSCTPGSDAATTEEASRNPMRNPVVXANGNSYDLSTKLLHLAWHPTENSIACAAANSLYMYYA

SEQ ID NO: 204299 - protein, 119 aa, Oryza sativa
  unsure (1)..(119): unsure at all Xaa locations
  Clone ID: PAT_MRT4530_993C.1.pep
GLNSLVEVNQSGLVMETMIDITPKDPLPTPSVGPLDPDCSREGLVLCDKERIKGQQGVSLDAMVGILTRLGRDMEQIGVDKSFKXLAEKVASIMEGAQPLLSQVQFSDDLADTRINPKA

SEQ ID NO: 204300 - protein, 60 aa, Oryza sativa
  Clone ID: PAT_MRT4530_99400C.1.pep
DRRDDDDDDDERHRLPPRAPACGGGGRGVHQDITGEVLFLDSAIRRKRFYSGTITFTDGY

SEQ ID NO: 204301 - protein, 45 aa, Oryza sativa
  Clone ID: PAT_MRT4530_99401C.1.pep
TYKLLHPNHTNYNARAFFLHLQIKWGLSSQAFIWGSVTELSVAYH

SEQ ID NO: 204302 - protein, 226 aa, Oryza sativa
  Clone ID: PAT_MRT4530_99402C.1.pep
IQVVSPVAPLAQPTAPASTPLPAPSALAPGQLVNPQLLMREQPQHSGQVVNRPTQDQVAAMFLPPQPAVDPIQQQPIQQTLPIQQVVQPVQQQVVQPVQQTPPRQQPPRPIQQTPLRQQIVQPIQHQACASAGFVTPGGQPVQQFLNQVVPEHLVHHVQPDGTIMPQVVPEHLARNMQLNLHNYQRGNLNYQYQHPSPQAQYQLGGLAQPQFASQYSQFEPMQQQS

SEQ ID NO: 204303 - protein, 180 aa, Oryza sativa
  unsure (1)..(180): unsure at all Xaa locations
  Clone ID: PAT_MRT4530_99403C.1.pep
LQDQINWHASIPEGEXWTCTGVKQIFQASCFPSTRFWHTRWDRLEVXKFSLMDDKPPASLSSASPSSIKEKIQXLGLSEVNEGNIVNITPDKLIPNQKKDFEAMMQQARNQFLSSFMQTXQGSVVQKYKVKVVADVPGTGSSKDGEVKQAPDGSAQPSDKGALDGSQGNQGDNSQGVQGV

SEQ ID NO: 204304 - protein, 164 aa, Oryza sativa
  Clone ID: PAT_MRT4530_99404C.1.pep
MKFSIVFAGLFASTAIATPQGNVTPNTMGALEKRASFPIPASKGSVTYKKVEYISGTFDGGTKTYGRGVKCTGQAEGGDSDAVFILKNGATLKNAIIGADQIEGVHCEGSCTIENVWWKKVCEDALSLKGDGNALIKGGGTTGAADKGIQHNGLGTVTIDGFTG

SEQ ID NO: 204305 - protein, 2017 aa, Oryza sativa
  unsure (1)..(2017): unsure at all Xaa locations
  Clone ID: PAT_MRT4530_99405C.1.pep
LQDQINWHASIPEGEFSTCTGVKQICQASCFSSTCFWHARWDRLEVNSSFXMTEKLPPSPSLASPGSVKEKXIQQLSLSEVNEGNIVTITPDKLTPDQQKDFDAMMQQARNQFLNSFMQTRKGTVVQKYIVKVVADVPGTGSSKDGEGKQAPDGSAQPSNKGAADGSQGNQGDSSQGVQGVQGDGAHGVQDQVDYAVHHALINQSGILVNTLSNIVKTMVDGSMAEYQATGPVYLPGGMFPNYRPLITDNQPVVQSISLNAPSAQPTAQVLVPTLAAPPLAPGQLVNPRLLVREQPQHSGQNVNRLTQEXVASMFLPPQHTVDPAQXSRLNKHHQGSRLCSRVCNAWXSAWTACCESSGSRALSSXCATISNNVMKEQFGLRPKDAGNLYRQPYPEWFERVPLPNRFKVPDFSKFSGQDSTSTYEHISRFLAXCGEASAVDASRVRLFRLSLSGSAFTWFSSLPYGSINSWADLEKHFHSSFYSGVHEMKLSDLTTIKQRHDEPVHEYIQRFREMRNKCYSLSLTDAQLXDLAFQGMIAPIREKFSSEEFDSLSHLTXKVTLHEQRFAKARKNSRKVNHVCPYIYGSDDDDDDDSEIAAAEWVRSKKVIPCQWVKNSGKEERYDFDITKADKILDLLLXEKQIQLPAGHTIPSAEELGKKRYCKWHNSRSHTTNDCKIFRQQIQAAIDGGKIKFDDSKRPMKVDGNPFPVNTVHTAGRTANGGRAKGFQVNSAXIINKYQKKYDRQQEKRYEEDDDGMRLLSIEDCPGCSNVAESSSRSYNRGNRLGQARVPVHQRLGPVNQGCNQEDNEDRKTQWCPSGIFTKNQKRRKTKPKQEWRVKKQAPVADEGATDEAKRLAKGKSIVTASVNMVFTLPAEFGIKQADVDEVEEESAKLILSPEQAVFEKPEGTENWHLKPLYINGYVNGKPMSKMMVDGGAIVNLMPYATFRKLGRNTEDLIKTNMVLKDFGGNPSKTKGVLNVELTVGNKTIPTTFFVIDGKGSYSLLLGRDWIHANCCIPSTMHQCLIXWQGDKIEIVPADSQLKMENPSYYFEGVVERSNVYTKDTVDDLDDKQGQGFMSADDLEEIDIGPEFRTKLIELLKEFRDCFAWEYYEMPGLSRSIVEHRLPIKPGVRPHQLPPRRCKADMLEPVKAEIKRLYDAGFIRPCRYAEWVSSIVQVIKKNDLNKATPKDEYSMPVADQLVDAASGHKILSFMDGNAGYNQIFMAEEDIHKTTFRCPGAIGLFEWVVIDVGLLPDNSGARTCIKILVSXLFYLSLVYILAPTIPILCKYQNRIADLRKVFESTRKYGLKMNPTKCAFGVSAGXFLGFLVHERGIDVIQRSVNAIKKIQPPENKTELQELIGKINFVRRFISNLSSRLEPFTPLLRLKADQQFTWGXEQQKALDNIKEYLSSPPVLIPPQKGIPFRLYLSAGEKSXSIGSVLIQELEGKERVVFYLSRWLLDAETRYSPIEKLCLCLYFSCTRLRHYLLSNECTVICKADVVKYMLSAPILKGRIGKWIFSLTEFDLRYKSPKAVKGQAIADFIVEHRDDSIGSVEIVPWTLFFDGSVCTHGCGIGLVIISPRGESFEFAYTIKPYATNNQAEYEAVLKGLQLLKEVEADAIEIMGDSLLVISQLVGEYECKNDTLMVYNERCRELMKEFRLVTLKHVSREQNIKANDLSQGASGYXPMIKDVKVEVVVITADDWRYDVHQYLQNPSQSASRKLRYKALKYTLLDDELYYRMIDGVLLKFLSANQVKVAIGEVHEGICGTHQSAHKMKWLLWRAGYFWPTMLEDCFRYYKGYQDCQKFGAIQRAPASAMNPIIKPWPFRGWGIDMIGIINPPSSKGHKFILVATDYFTKWVEAIPLKNIDSLDAIQFVQEHIIYRFGIPQTITTDQGSIFVSDEFVQFADSMGIKLLNSSPYYAQANGQAEASNKSLIKLIKRKISDYPRQWHTRLTEALWSYRMACHGSIQVPPYKLVYGHEAVLPWEVRIGSRRTELLNGKYLKKYYPNVWVNA

SEQ ID NO: 204306 - protein, 203 aa, Oryza sativa
  Clone ID: PAT_MRT4530_99406C.1.pep
MAEKQPPPPSPASPGSVKEKKYKIEVVADDPGTSSSKDGDGKQAPDGSAQLSNKSAIDSSLGNQGDNSQGVHGVQGDGVHGVQGDGAQGLQGGNHNQNSDAAQDFFSNFQDRVDYAVHHALINQSGVLVNTLSNMMKSIADGSIAEHQAAGPVYLQGGVFPNYRSLITDVQPSTQAVSSAAPTSQPTVLATFCDKLTSTIAAP

SEQ ID NO: 204307 - protein, 65 aa, Oryza sativa
  Clone ID: PAT_MRT4530_99407C.1.pep
MGNIYGCAREPLQLTLERKGGKGEGGGPMGLLPLLTPSGIDQTWWCDGGNRGIGDARAVADAGLK

SEQ ID NO: 204308 - protein, 308 aa, Oryza sativa
  Clone ID: PAT_MRT4530_99408C.1.pep
MAPSKQYDEGGQLQLMDAERIEEEEECFESIDKLISQGINSGDVKKLQDAGIYTCNGLMMHTKKSLTGIKGLSEAKVDKICEAAEKLLSQGFMTGSDLLIKRKSVVRITTGSQALDELLGGGIETLCITEAFGEFRSGKTQLAHTLCVSTQIIYARAYTYEHQYNLLLGLAAKMAEEPFRLLIVDSVIALFRVDFSGRGELAERQQKLAQMLSRLTKIAEEFNVAVYITNQVIADPGGGMFITDPKKPAGGHVLAHAATIRLMLRKGKGEQRVCKIFDAPNLPEGEAISFCIVHTCLLKLLVQLVTLV

SEQ ID NO: 204309 - protein, 184 aa, Oryza sativa
  unsure (1)..(184): unsure at all Xaa locations
  Clone ID: PAT_MRT4530_99409C.1.pep
MTPGQPVNPRLLTREXPQHGGQAANRLTQDQVAAMFLPPPPVVDPVQQQPIQQAPPIQPVVQPIQQQVVQPAQQTPPRQQPLQPIQHTPPRQQPLQPIQQTPLRQQIVQPIXHPGSVNASAGLAVPGGQQPDGTVMPQMIPEHLVRNIQPNLHNYQGGNLSYQYQPPSPQAQYQPGGSAQPQFA

SEQ ID NO: 204310 - protein, 532 aa, Oryza sativa
  Clone ID: PAT_MRT4530_9940C.1.pep
MPPRRDRVMDPSSKSPDDDDLRPEAEAARRPQPQPQPREWRFAQVFGERAAGEDVQEVDIISAIEFDKSGDHLATGDRGGRVVLFERTDSRDSASRSELERQDYPIARHPEFRYKTEFQSHEPEFDYLKSLEIEEKINKIKWCQTANNALFLLSTNDKTIKYWKVQERKVKRISVMNLNTSQSSGNGTTSSSSSSSSRAILPNGGCSEKLYNFPNNDLLFPPGGCTSLRLPVVTGQDLNLVPRCRRVYSHAHDYHINSISNNSDGETYISADDLRINLWNLEISNQSFNIVDVKPANMEDLTEVITCAEFHPTHCNTLAYSSSKGSIRLIDLRQSALCDNHAKLFEEHEAPGSRSFFTEIIASVSDIKFARDGRHILSRDYMTLKLWDINMDSGPVATFQVHEYLRPKLCDLYENDSIFDKFECCLSGDGLRVATGSYSNLFRVFGCTPGSAEATTLEASRNPMRRQVANPTRPARTLTSLTRAVRRGGENPGVDANGNSYDLSTKLLHLAWHPTENSIACAAANSLYMYYA

SEQ ID NO: 204311 - protein, 55 aa, Oryza sativa
  unsure (1)..(55): unsure at all Xaa locations
  Clone ID: PAT_MRT4530_99410C.1.pep
AWPGGGMFXTDPKKPAGGHVLAHAATIRLMLRKGKGEQRVCKIFDAPNLPEGEAI

SEQ ID NO: 204312 - protein, 173 aa, Oryza sativa
  Clone ID: PAT_MRT4530_99411C.1.pep
MSSSASPSAAPSAEYAELGLKMNNIGPLDVVVTPLPPVPAPSSAATYNQIQRRCGRRQPSHCSLSSTNPPIASLCLAGCTLRQIHRRHGHCYRLLVLFVVVVAISLALMGIRRDAPRVADVMCLGIELDVPHAAERGAVERHHDGQEEKGRSRRRMRGGGKEKAKVWWRQRRR

SEQ ID NO: 204313 - protein, 136 aa, Oryza sativa
  Clone ID: PAT_MRT4530_99412C.1.pep
MAEMCVGANGPPRHRAAAPSPSPPILLITEPTPSLCLRSSYHICGCCHPSTATASHSPSSAVLLVTEPTPPLLPFMELLPPLCRVVTVSSTTASGPPRRRVNVASLPPILPSAKQPGALRSCCRAAATAPPALRAL

SEQ ID NO: 204314 - protein, 129 aa, Oryza sativa
  Clone ID: PAT_MRT4530_99413C.1.pep
MVRLATTAPGVSSRRLRRSSAVEMWREWERRRAREQQPRCGEVAGGTAAECAAVFCCFPFTVIKLVVLATVCIPAALCRRAVQGGVAAWRGGAGVDGEARTAQACSGCARAATPVGEAMGLGATVGEEV

SEQ ID NO: 204315 - protein, 112 aa, Oryza sativa
  unsure (1)..(112): unsure at all Xaa locations
  Clone ID: PAT_MRT4530_99414C.1.pep
FSRPERIVPIAERFGMDANAVLDNIIYARAYTYEHQYNLLLGLAAKMAEEPFRLLQKLAQMLSALTKIAEEFNVAVYITXQVIADPGGGMFXTDPKKPAGGHVLAHAATIRL

SEQ ID NO: 204316 - protein, 1032 aa, Oryza sativa
  Clone ID: PAT_MRT4530_99415C.1.pep
MALILIGVASFLDFVGMKNQKRRVQRLRNRERFQEVEQEINHRLKKVKPWQEWRVKNQVPIADEAAADEAKRLAKGKSVVTASINMVFTLSADFGSKQADVDEVEEELAKLILSPEQAIFEKLVGTKNQHLKPLYINGYVNGKPMSKMMVDGGAAVNLMPYATFRKLGRNAEDLIKTNMVLKELCGNPSETKGVLNVELTVGSKTIPTTFFVIDGKGSYSLLLERDWIHANCCIPSTMHQCLIHWQGDRIEIVPADSQLKMESPNCYFEGVVEDSGVYVKDIMDDLDDKQGQGFMSADDLEEIDIGPGVRPHQQPPRRCKADMLEPIKAEIKRLYDAGFIHPCRYAEWVYSIVPVIKKNGKVRVCIDFRDLNKSTLKDEYPMPVADQLVDAASGNKILSFMDGNAGYNQIFMAEEDIHKIAFRCPGAIGLFEWVLMTFGLKSAGATYQRAINYIYHDLIGWLVEVYIDDVVVKSKEIEDHIADLRKFLGFLVHERRIEVAQRSVNAIKKIQPPENKTELQEMIGKINFVRRFISNLSRRLEPFTPLLRLKADQQFTWGEEQQKGLDNIKEYLSSSPVLIPPQKGIPFRLYLSAGRVGKWIFSLTEFDLRYESPKAIKGQAIADFIVEHRDDSIGSVEMVPWTLFFDGSLSMKQLLKEVEADAIDIMGDTLLVISQLAGEYECKNDVLIVYNEKCQELMKEFRLVTLKHVSREQNIEANDLAQGASGHKPMIKDVKVEIAAMTIDDWRYDVHQYLQNPSQSASRKLRYKALKYAVLDDELYYRMIDGVLLKCLSADQAKVAIGEVHEGICGTHQSAHKMKWLLRRAGYFWPTMLEDCFRYYKGCQDCQKIGAIQRAPASAMNPIIKPWSFRGWGIDMIGSIFVSDEFVQFADSVGIKFLNSSPYYAQANVQADASNKSLIKVIKRKISYYPRQWHTRLAEALWSYRMACHGSIQVPPYKLVYGHEAVLPWEVRIGSRRIELQDDLTADEYYNLMADEREDLVQSHLRALAKVTKVKERVDRHYNKKVVPKTFS

SEQ ID NO: 204317 - protein, 264 aa, Oryza sativa
  Clone ID: PAT_MRT4530_99416C.1.pep
ISGRLFLVFLPQFRAFLVYYFSRKSVRITTGSQALDELLGGGIETLCITEAFGEFRSGKTQLAHTLCVSTQLPIHMHGGNGKVAYIDTEGTFRPERIVPIAERFGMDANAVLDNIIYARAYTYEHQYNLLLGLAAKMAEEPFRLLIVDSVIALFRVDFSGRGELAERQQKLAQMLSRLTKIAEEFNVAVYITNQVIADPGGGMFITDPKKPAGGHVLAHAATIRLMLRKGKGEQRVCKIFDAPNLPEGEAVFQVTSGGIMDAKD

SEQ ID NO: 204318 - protein, 193 aa, Oryza sativa
  Clone ID: PAT_MRT4530_99417C.1.pep
MAEKPPASPSSAGELGSVKAKVHKLGLSEVDKANIVARHYGQITPEQQKDLEVMMQKQRNQFLSSFTKTRKGTLVQKYKVKVIADVPGTAPDDAAQPSIKGAADDFQGDQGDGSQEIQGDGVQGVQGGGLNHDGNAAQLQFNNFQDQVDYAVHYALINQSRILVNTLSNMVKTMVDGSMAEYQATGQVYLLGG

SEQ ID NO: 204319 - protein, 58 aa, Oryza sativa
  Clone ID: PAT_MRT4530_99418C.1.pep
VFFFFFFFFFFFFFFFFFFFFFFFLGGKKIYIYIFFYSHPIKQNPFPFFSQKKEACPS

SEQ ID NO: 204320 - protein, 401 aa, Oryza sativa
  Clone ID: PAT_MRT4530_99419C.1.pep
MGSLDGDAATSPSFSSTGSSGDGNGGGGGGGRVGIYACFALGGSNSLECYEPGANTWRRVGELPGVPDGHVLKGFAVVALGDFVYVIGGRLCRRERGGGGEYRDTDVDVRGDVVRYDARRGEWGRCAPLLVPRFDFACAPCGGKICVAGGQRSLSGARGTAAAEVFDADKGGWSRLPDMSTRRYKCVGVTWHGRFHVVGGFAESTSSSSPAAAADDEAAAAPPGRATALLLLLPQSSALERSSAEVFDCARGVWEIIPGMWQLDVPPNQIVAVAGRLLSSGDCLNSWKGHVEVYDGELNIWSIMDHSAMPDMPLLAALPPSAQRRYHTMAVVGNQLYFLAGYQVAAGGDGGFRTVSLVHSFDTSANPGLMPPWRSFQPTMDQDGVEDGSKELFSQCCSVQL

SEQ ID NO: 204321 - protein, 455 aa, Oryza sativa
  Clone ID: PAT_MRT4530_9941C.1.pep
MLALMLHLPVLHERVTVEFDEVDGDVDVPGLPRLCRQRPCRAVPDGGQEEPQLHVVRAPRRPLHGRHGHHREHRRGADELEPAGSPRHHRGQSVRAGANRISDLPDDLIQRILHFAPAREAASTGLLSSRWRSLWRSTGAVNLAVHVRRDQEREFFSARDAFVRSAHAALAAAAGGHVRRLTMHVETERMRICMQLTADAFLHRDPEDWERKHDVVAGVVSHPAARRVEELRVAAAVVEAYWPSSDREVTEMEEGEFHLSLGGSGGTQPSTETLRVLDLAGCGGLSAAAAAAGVLALPRLTTLRLRLCVVQVEDLQGVVDSAPALATVHLESVFLAGTKEDGCCARLRFRGHHRARAGQVQGPREPPQRRRRRQRLRGRHGDRRAEASIVQVHGASRGGSPSSRRRRRRRRMTRWWRARSSTSSTTTGLTTTATPPPCSARASGFSSTTSAAPSP

SEQ ID NO: 204322 - protein, 73 aa, Oryza sativa
  Clone ID: PAT_MRT4530_99420C.1.pep
MPRGKGRRKALTTRLRWRGRVVVAGGGGRWREADAAWVAVVPGPQLPFCPTAKLTGEEEEEALSAITGPGANS

SEQ ID NO: 204323 - protein, 344 aa, Oryza sativa
  Clone ID: PAT_MRT4530_99421C.1.pep
MAPSKQYDEGGQLQLMDAERIEEEEECFESIDKLISQGINSGDVKKLQDAGIYTCNGLMMHTKKSLTGIKGLSEAKVDKICEAAEKLLSQGFMTGSDLLIKRKSVVRITTGSQALDELLGGGIDTPRTPVAFGEFRSGKTQLAHTLCVSTQLPIHMHGGNGKVAYIDTEGTFRPERIVPIAERFGMDANAVLDNIIYARAYTYEHQYNLLLGLAAKMAEEPFRPLIVDSVIALFRVDFSGRGELAERQQKLAQMLSRLTKIAEEFNVAVYITNQVIADPGGGMFITDLKKPAGGHVLAHAATIRLMLRKGKGEQRVCKIFDAPNLPEGEAVFQVTSGGIMDAKD

SEQ ID NO: 204324 - protein, 322 aa, Oryza sativa
  unsure (1)..(322): unsure at all Xaa locations
  Clone ID: PAT_MRT4530_99422C.1.pep
RNVLWVYRLAQFLFLVLERGIEVTQRSVNAIKKIQPPENKTELXEMIGKVNFVRRFISNLFGRLEPFTPLLRLKADQQFTLGAEQQKALDDIKXYLSSTPGLIPPQKGIPFRLYLSAGEKSIVSVFIPELEGKERVVFYLSRRLLDAKTRYSPVEKLCLCLYFSCTRLRHYLLSNECTVICKADVVRYILSAPILKGRVGKWIFSLTEFDLRYESPKAIXGQAIANFIVEHRDDSIGSVEIVPWTLFFDGSVCTHGCGIGLVIISPRGACLXFAYTIKPYATNNQAEYEAVLKGLQLLREVEADTIEIMGDSLLVISQLXRA

SEQ ID NO: 204325 - protein, 452 aa, Oryza sativa
  unsure (1)..(452): unsure at all Xaa locations
  Clone ID: PAT_MRT4530_99423C.1.pep
KQPPPPSSPGSVKGKASKPGLTDIIDDNVMPIDPEKFTPEQKQEFEATLQQARDQFLNSFMQTRKGTLVQKYKIKLVADNLGTGSSKYGEVKKAPEGSAQPSNKGATDGSLGNQGDNPQGVHGVQGDRVHGAQGGGAQGPQGGNLNQSNELAQDFFNNFQDRVDYAVHHALINQSGVLVNTLSNMMKTIADGSIVEHQATGPVYLQGAADSADTTNPASCTANPTTGRTTXQQTPPRQQPLQPIQQTPPRQQLQPIQQTLVRQQIIQPIQHPGSANASPEFAPPGGQLAQQFVNQVVLEHLVHHAQPAGIVMPQMVPEHLVRNIQPNLHNYQGGQEGVSTYEHISRFLAQCGEASAIDTLKVRLFRLSLSGSAFTWFSSFPYGSINSWADLEKQFHSYFYSGVHEMKLSDLTAIKQWHDEPVHKYIQRFREMRNKCFSLSLTDAQLADLALQ

SEQ ID NO: 204326 - protein, 236 aa, Oryza sativa
  Clone ID: PAT_MRT4530_99424C.1.pep
MAEIETISSLADADDVLENRGINQVEGINQVQFRLDEQISLVAATEVKVRTRPGRLGFRLLNPELMDCKFQTKVKLDEAYERMFTECMIECDQELVPLEAHIAELKRLLLLPNNEIEDIGPDIMQRGRGLQQVLYLHPPFPLYPEYEYHPPPQPQIPYQPAYATAKERENARSRDRRAQRAWWHANLTLLETKKKILEGKRIDLERGLSSMISGLGSEAGHAVVRCPLQISAAGEE

SEQ ID NO: 204327 - protein, 260 aa, Oryza sativa
  Clone ID: PAT_MRT4530_99425C.1.pep
MAIKDRFTGNPRRLTVLTTSGSGAEDLPSGSCPVEVGFVAAVKDCLWSGVPPLQNEAGVMPCHIHGGAALDKQLVPTASKANGTTLAVRKPPSKDRHSKVDGRGRRVRMPIICAARVFQLTRKLGLKSDGQTIEWLLREAEPSIIGATGTGTTLASSSPRRPLHPRQAPPWADFGQFWSFAAVREMMAATAAPAMLGEAFAATKQQPGRSQPRRRMCSTTGEVTAAASAPRGLLAGAAGARRLSVPAATSPLSPDVLLYG

SEQ ID NO: 204328 - protein, 439 aa, Oryza sativa
  Clone ID: PAT_MRT4530_99426C.1.pep
MECCFVVPSEKTPKHVLWLSPLDIVLANRGALTPLVHFYRRRHDAAGGGGGFFDVGRLKEALAKALVAFYPLAGRFRVGGDGRPEIDCNADGVFFAVARSELAVDDILTDLKPSPELKRLFIPRTEPPSAVLAVQVTFLRWGGIVLGTAMHHAAVDGHSMFHFLQTWAAFCRDGDAAVVELPCHDRALLRARPRLAIHPDASSVFCPKLNLRPPSASGSGLISAKIFSISDDQIATLKRICGGGASTFSAVTALVWQCACVARRLPLCSQTLVRFPVNIRRRMRPPLPDRYFGNALVEVFAAAAVEDIVSGTLAAIAARIKGVIGRLNDDEMLRSAIDYNEMAGMPDRPDNGSLPETELRVVSWLGIPLYDAVDFGWGKPWAMSRAESLRGGFFYVMDGGAADGDGGDAAAVRVLMCMEAANVEEFERLLRAKFVYPRI

SEQ ID NO: 204329 - protein, 186 aa, Oryza sativa
  unsure (1)..(186): unsure at all Xaa locations
  Clone ID: PAT_MRT4530_99427C.1.pep
MAGAAVAAIISRTAAKLQNWPKSAPAESTQKPSTGASEARVGEGEVAKLAGELENTGSADDGHADAAAAAVDLAMAVLGGRLADSEGGAIGFGGGGDELLVQSGAAMDMTRHNACLAVTPRNSRTRISKLNRGDSTPQAILDGSDETNFNRTAPTRKIFSSGVXGEKRARLSTTHCTQQVIPEEEV

SEQ ID NO: 204330 - protein, 120 aa, Oryza sativa
  Clone ID: PAT_MRT4530_99428C.1.pep
MSGCHLISLPPSSSLSSLLLFSWMELRARRTAEVSVGVGEAKESGATAGGAAGGGGDDGDGVWMHQPAKKTSWTHQPSPGTAMTGSGTTSMVGDLLGMASMLPKTTGSPMSSDGGCNLLE

SEQ ID NO: 204331 - protein, 181 aa, Oryza sativa
  Clone ID: PAT_MRT4530_99429C.1.pep
MAMYTRVVRRRHDGEEQDGVAVLDDVRYDDDSSTSGNANYKCEKRNHHLGAWEETRMDLVGEEVVREVYLTKGKAVGARSCRRVCRGQIFLPGGGGGGGGEAVEYRSHRREGRRGKILLDRTVIGADLVIEEVIGAHIIGNKAIMGGSYERAYQSGAADLVREEAIRGSILPEPRREATNE

SEQ ID NO: 204332 - protein, 51 aa, Oryza sativa
  Clone ID: PAT_MRT4530_9942C.1.pep
SLLKNHVCRELSVSRFLCIHFDHIGQMLSHCAAYMYLTYERYTLRSICVFT

SEQ ID NO: 204333 - protein, 189 aa, Oryza sativa
  unsure (1)..(189): unsure at all Xaa locations
  Clone ID: PAT_MRT4530_99430C.1.pep
DEGITGINLSKELPVVAANALKGHLVAFGLAVLPTSELLRVAISFINHKIINKFFTTTKDSNNNYYRPGFHRLFQHFCIHPGARGVLDEVQRGLGLTDDDMEXASHMTLHRFGNMASSSLLYELAYIEAKGRMRKGDRVCMISFSPGIDCSSVVWECXSQQITTVHHGPWAACIDRYPVQLPKIVKRTA

SEQ ID NO: 204334 - protein, 90 aa, Oryza sativa
  Clone ID: PAT_MRT4530_99431C.1.pep
CPCHQLVRIADSQVNIGAVVFTESESKRRANRYRRTCRSNYFERAASSSPPPGSSANVSSATLDLISRSPDPSKNSLSLSLSLTQLKLVC

SEQ ID NO: 204335 - protein, 142 aa, Oryza sativa
  Clone ID: PAT_MRT4530_99432C.1.pep
MDDDVWIATVLNGITEQSKDHYAKLIPHAYNLLYLDRQILIQRWPETDARIAKFLVSRTRRELNGITAKGGPPCKSISLTNWAGPHVGVMARNDTPSLRRGSRSPELRPLRLTAATGFRRLYAGDAVPPAPELPAKSNRSCQ

SEQ ID NO: 204336 - protein, 90 aa, Oryza sativa
  Clone ID: PAT_MRT4530_99433C.1.pep
MALLMWSNLAPRSGYGCVPFDLTDFRDHSSSPAKTLGFSAFDVDAANNKNNNHDTDDEDACLDDVSRLQHLFEEKGLVAVENTDMALRKG

SEQ ID NO: 204337 - protein, 80 aa, Oryza sativa
  Clone ID: PAT_MRT4530_99434C.1.pep
LFHPLVPSQKYWICKPIRSVINESLPQDHIIVLEKPSTIAATSTPDHSMPSENVQKKVHANGLDVAPVYKLMKTSKSGMF

SEQ ID NO: 204338 - protein, 255 aa, Oryza sativa
  Clone ID: PAT_MRT4530_99435C.1.pep
MWRQGVSCFGVGAFHVTGLYGPGIWVSDPYGLTGKVQAVNPAWGAEGFDPFVPGGIASHHIAAAFVVAGTMWYGSATTPIELFGPTRYQWDQGYFQQEIYRRVSDGLAENLSLSEAWSKIPKKLAFFDYIGNNPAKGGLFRAGSMDNGDGIAVGWLGHPIFRDKEGRELFVRRMPTFFETFPVVLVDEEGIVRADVPFRRAESKYSVEQVGITVEFYGGELNGTWMLKWNLEHSKKSEIQLRGDSQSEAALLWYL

SEQ ID NO: 204339 - protein, 84 aa, Oryza sativa
  Clone ID: PAT_MRT4530_99436C.1.pep
MARRQREVKREEKRGSSGLGFIGEEERFRNWDLDERKESTEDSRWGFGYFGSGEVFGDDSKRGIEFQSLIWRHESEEEFRGGNF

SEQ ID NO: 204340 - protein, 341 aa, Oryza sativa
  Clone ID: PAT_MRT4530_99437C.1.pep
MALYELAVFDPSDPVLDPMWRQGVACFGFGAFHVTGLYGPGIWVSDPYGLTGKVQAVNPAWGAEGFDPFVPGGIASHHIAAAFVVAGTMWYGSATTPIELFGPTRYQWDQGYFQQEIYRRVSDGLAENLSLSEAWSKIPEKLAFYDYIGNNPAKGGLFRAGSMDNGDGIAVGWLGHPIFRDKEGRELFVRRMPTFFETFPVVLVDEEGIVRADVPFRRAESKYSVEQVGVTVEFYGGELNGVSYSDPATVKKYARHSQLGEIFELDRATLKSDGVFRSSPRGWFTFGHATFALLFFFGHIWHGARTLFRDVFAGIDPDLDAQVEFGTFQKVGDPTTRRQPV

SEQ ID NO: 204341 - protein, 63 aa, Oryza sativa
  unsure (1)..(63): unsure at all Xaa locations
  Clone ID: PAT_MRT4530_99438C.1.pep
CVTLFIXXXXXXXXXRXLKRGSQYKGKTAGQIVGRAIGSGLFVINATCEKGNVLQADKVGNAQ

SEQ ID NO: 204342 - protein, 90 aa, Oryza sativa
  unsure (1)..(90): unsure at all Xaa locations
  Clone ID: PAT_MRT4530_99439C.1.pep
ERDWSSLPSDMLALVLERLGWSSHPXFALTCRHWRSAVSPFYPAWITPLLLSCADVVGRTNIRVYCVNTTLALQLTRSTERSSTWKQGHS

SEQ ID NO: 204343 - protein, 192 aa, Oryza sativa
  Clone ID: PAT_MRT4530_9943C.1.pep
MWSSRWSGVRPAWLLLASRAAAAVALAGVLLWDALTYDLTIMVYYTEASTTQSMHAWNLQIATLFSAYGCFMYSMHHRHVTMLPEIDESLVGLSGSLMEINHGADQKGGAGLNQLGRFMQIVYQVLGGAVVLTDVVFWALIVPFMYSSHFSLNAVSDSGRTHSLTLQHHGLHYGISASHYSIWRATPCIGPL

SEQ ID NO: 204344 - protein, 384 aa, Oryza sativa
  Clone ID: PAT_MRT4530_99440C.1.pep
MALYELAVFDPSDPVLDPMWRQGVACFGFGAFHVTGLYGPGIWVSDPYGLTGKVQAVNPAWGAEGFDPFVPGGIASHHIAAGTLGILAGLFHLSVRPPQRLYKGLRMGNIETVLSSSIAAVFFAAFVVAGTMWYGSATTPIELFGPTRYQWDQGYFQQEIYRRVSDGLAENLSLSEAWSKIPEKLAFYDYIGNNPAKGGLFRAGSMDNGDGIAVGWLGHPIFRDKEGRELFVRRMPTFFETFPVVLVDEEGIVRADVPFRRAESKYSVEQVGVTVEFYGGELNGVSYSDPATVKKYARRSQLGEIFELDRATLKSDGVFRSSPRGWFTFGHATFALLFFFGHIWHGARTLFRDVFAGIDPDLDAQVEFGTFQKVGDPTTRRQPV

SEQ ID NO: 204345 - protein, 240 aa, Oryza sativa
  unsure (1)..(240): unsure at all Xaa locations
  Clone ID: PAT_MRT4530_99441C.1.pep
GSRRVYCVNTTLALQLTCATQDGDGEWGPWDXREFNVEAGTQLIPAAPISNPVLHDGLLYVLGGDGKLAVYDPCNHADNFRLLGKPDNFGIDHQEVDSHLFESDQGELMAVLVGYNGAPVHVAKLNEATMEWDKLETLEGRALFTGTYTTMMRKTRFKSMQNKVFLPRLYEWPETVHVDLIVRDGEAAFVPKSYSPSSIKKITSSMNIWSYGIGRQEEEAREFWGLERVDYSIWVDFSTS

SEQ ID NO: 204346 - protein, 302 aa, Oryza sativa
  unsure (1)..(302): unsure at all Xaa locations
  Clone ID: PAT_MRT4530_99442C.1.pep
RLFYYIHVILSMMFFWIKIYRFMTIFPTIXKLDRSFXVLGFAASLKFHAFDGSNYKRLKPRALLWLITMQCFFIXSWGKTTERPFSPEEEAKFESADCLFRGALINVLADNIMDVYMHMPSGKDFWDAFEVKFEVFDVGSELYVMEQFYDYXMVDVCSVVEQALEIQILAMDLENNXLPNKFMAGGIITKLPPSWSDFATSLKHKXRQEFNVTDIISSLGVEDKARAKDNRGKKVEXNSYASQDNKKIXKLNTTTNFKKKCKRKAXRHSFMCGESGHWTKNSPDRKDXKSANMVKSVILLYL

SEQ ID NO: 204347 - protein, 52 aa, Oryza sativa
  unsure (1)..(52): unsure at all Xaa locations
  Clone ID: PAT_MRT4530_99443C.1.pep
MSDRCGNCYCADXASAVKKGTSYGVTVVEAXKSHFQEVAXGEENGGCKCGTS

SEQ ID NO: 204348 - protein, 251 aa, Oryza sativa
  Clone ID: PAT_MRT4530_99444C.1.pep
MERERRTPSAATSLHHRRLLTLVDAIGSSKAVCGCGERGRGERRIQPHRRPSLFHRHQACQRPPVGARSFPFPFFHSDGTIMRPFVPRHAALRLRPGPLPRRAARRLPHHLPNPVPPPPPASKLPIILYFHGGSFVLFSTDNVFYHASCEAMAATVPAIIVSLDYRLAPEHHLPAAYVSTVLWLCDAAAGDPWIAASAREVAGVGAVAVGCLALSSLPYSGRHHSSPPPPLRPAAQAEREKREREGDREKW

SEQ ID NO: 204349 - protein, 323 aa, Oryza sativa
  Clone ID: PAT_MRT4530_99445C.1.pep
MGAHGDHRHHHHHQEAGVLVDEEEEEVIEQACGGPTSGVVEQEVGGDGGGVCQDAAGMVFEATSSVGSVSATMGPPPIMCWPPPAQPVHGAIHHHHNLGGGGGQQSPFFPLLPPLPPQPPPPPPFFADFYARRALQYAYDHSGGASSSSDPLGLGGLYMGHHGSHVAGMMMPPPFAPSPFGDLGRMTAQEIMDAKALAASKSHSEAERRRRERINAHLARLRSLLPNTTKTDKASLLAEVIQHVKELKRQTSEITEEACPLPTESDELTVDASSDEDGRLVVRASLCCDDRTDLLPDLIRALKALRLRALKAEITTLGGRVKN

SEQ ID NO: 204350 - protein, 411 aa, Oryza sativa
  unsure (1)..(411): unsure at all Xaa locations
  Clone ID: PAT_MRT4530_99446C.1.pep
GCERCGGRRDGRLVRFRRRGRRRGGGVXGRVLGKRRLQADDDEDEEEAPTSRRARDSXRFIGKTAEEYAASKAAFASRPRRIETAEEWEARVRKNIEEQDKAYEEMMRSQDDDESNWDYIAYRNSWNDTWSGSRGSFEEVSEDPPMHFTHKPALGYYSASALDTLQIFSVKVAATSGGLQWPLDVFGIVSIRDSVDRNRNVVFHRTRDNCQTLTEQERNLVLVGPTRAVVLSMPDPLIIDVEMKVKGTTESEDKRLSLLAVPLLCAGKYYSHVLKSGSYTSKLSTLEFRLGYIVSSVEATISVRVIRGSWPDGFHGQFAAYTTGVRFRKIVLLDSRGDQNVVTVSGDGTIELSRRVVSVEKVGKLKVLVRAWELVDHNNVVEQVKVFTPLEAGFVDDERILLLDSRGDQKV

SEQ ID NO: 204351 - protein, 141 aa, Oryza sativa
  unsure (1)..(141): unsure at all Xaa locations
  Clone ID: PAT_MRT4530_99447C.1.pep
CVRRILKTCQLPFSFASSSSVSSFLCLTVSREKREERVSGASALRWPEGGDVGGETCSRATRIRRSCRLAKETKEEAGTATAGAQLRRXKEVAVVVYFKSGGRGEXEKWNQLVEAKLMARGFGXWSXGEGDWAVAAIAGHG

SEQ ID NO: 204352 - protein, 213 aa, Oryza sativa
  unsure (1)..(213): unsure at all Xaa locations
  Clone ID: PAT_MRT4530_99448C.1.pep
LLMREYPQPAGQTSNQPTQDQVAAMFLPPPPPVVQPIQQXAVQPIQQAQPVQPMVQPAQQQVAQPVQQAPLTQQHLQPIXQTPPRQRLQPIQQTPVRQQPIQHLGSANASAGFAAPGGQPAQQVVNQATPEHLVHHVQPDGTVIPQMVPEHLVRNIQPNLHNYQGGNLSYQYQPLSPQAQYQPGGSAQQQFVPQFGQFEPMQQQSHGAAQQRP

SEQ ID NO: 204353 - protein, 821 aa, Oryza sativa
  Clone ID: PAT_MRT4530_99449C.1.pep
MASPRPPPASLRSFLDAHFASPEDLASAPALAELLRRECVGLDASLRRLEAQLASVSASWLARSAGARASLRRIRSRGGGFGVEEDDGEETLRSAELPALVQEIHRIDAIRLYAEAALQLEAFVGNLEDATFSIVRQASKLNLSSVFRPASNEMQWKQEKLLQAVDAMRDIELELLRISTNRPQWTNLIMAVDSRVDKTLAILRPKALTDYRALLAALGWPPSLSSPDAANNKYSEIPNPLILMNEANKEKYSQSFLALCALQHAQANCEARQCQAKGASASMSDSKYFDKTAACFDNGLWAIDELVQPIASRLEYHFAKWSEQPEFIFALVYKIARDFMGGVDDILQPLIDRARLVGLSAKESWVTGMVKMLLGYLERQIFPVLVTSYQATDDKFEVHSSWMHLNDLMITFDKRMQLLADSGIQKIASISEGLSRSLSVFSIYSEHSDWLHMWAGVELNSAQHKLKSEMEDEINWSYSIKELGLQEITSNFLLSTREDYKAPTISEFVVKTASAMIERGHALPNRGLRIQYNRSSSVQFLSDFFLVLRERCEALQLTNTALEDDSLLKASFAINAARYCEYVLREWDDDIVFLEMGAHRKHVDEGQGQGHKHSAQHPCSFFGDEIAFLAKLGTDYLEQIMSSVLLEFEDLSWDYVQNIGLPNEQIHPVDEVLDEENLGVSPGFVASLEVVRDRTTKLMLHLNSKDFLDLWRSIAEGLDYFIYSSIRWGELTFSDQGVVQLRVDTKALLHIFRPFCLRPEAFFPFISDSLRLLAMRKTDARYLLEVLKNAKENDSCLRQQGLQHVNASQAMKILGSKRSDG

SEQ ID NO: 204354 - protein, 93 aa, Oryza sativa
  unsure (1)..(93): unsure at all Xaa locations
  Clone ID: PAT_MRT4530_9944C.1.pep
GGGWAIPSNPNKGTGETCVPSKSGLGISIRHVLVHCFCILMEXTTTKAPTKWHLVVELSWGVGVCFSLKDSLGALLLHPVXSMGXLVSWEIRX

SEQ ID NO: 204355 - protein, 284 aa, Oryza sativa
  Clone ID: PAT_MRT4530_99450C.1.pep
MAAVIAGGGGAVRSEDLLKNRRVVMSPCGGVGGSAGHCCGLPILLRALTVVATCGLYRSAPGCIGWSRLVPIPQAVRGGGDRRRRLQVSVAGCCYAMKVTQLADASVLVHVANIFHGVSILRSRRHLFDSSLLLSSGHSLGGLDWRLWPLNNEALILLLLDLSFKCFKTSSAIPGLLERQKFYRHHLIKGMFGWAVAFEKAAVAFGKALSRPHMSCHGVAAQSSMKPAVALGRRCRREVRRGGNSAGERSNDSGDKCGQKSAAKTYGILEFVRDNSRVRYGHIL

SEQ ID NO: 204356 - protein, 91 aa, Oryza sativa
  unsure (1)..(91): unsure at all Xaa locations
  Clone ID: PAT_MRT4530_99451C.1.pep
MYGGRYGHEGVPRDGEMAKRGKVELDTVQDRGRQRRRKVLDGFSXCPAATRLPLWRRRQHGSSSTPSNLQLRXGSLTMVICSGGERVIARC

SEQ ID NO: 204357 - protein, 237 aa, Oryza sativa
  unsure (1)..(237): unsure at all Xaa locations
  Clone ID: PAT_MRT4530_99452C.1.pep
AAPSVASTTQPTAPASTPLPATSATASAQPINPRLLMREHPQLAGQTSNQPTQDQPIQXQVAQPAQQTPPIQPVVQPIQXQVVQPVQQAPSTQQHLQPIQQTPPRQRPQLIQQTPYMGGNLRSSLXNQVIPEHLVHHAQPDGTVLPSPQAQYQPAGSAQQQFTPQFGQFEPMQQQPQGAAQQRPWADVIADVMREQFGLRPKETGSLYRQSYPKWFERVPLPNRFKIPDFSKFSGQE

SEQ ID NO: 204358 - protein, 71 aa, Oryza sativa
  Clone ID: PAT_MRT4530_99453C.1.pep
VGRVGGLKQGRQQAVESRKAGNIRGLVVHGERGHPGVTDRLCAQLRHVLVHAPRSKITLPTSPPSLLQKTE

SEQ ID NO: 204359 - protein, 166 aa, Oryza sativa
  Clone ID: PAT_MRT4530_99454C.1.pep
MRNKCYNLSLTDAQLADLAFQGMIAPIREKFSSEDFDSLSHLTQKVTLHEQRFAEARKNSRKVNHVSPYIYGSDDEDEDDSEIAAAEWVRSKKVIPCQWVKNSGKEERYDFDVTKADKIFDVPLREKQIQLPASHTIPSAKELGKKRYCKWHNSGSHATNDCKVFR

SEQ ID NO: 204360 - protein, 139 aa, Oryza sativa
  unsure (1)..(139): unsure at all Xaa locations
  Clone ID: PAT_MRT4530_99455C.1.pep
IAPATQPTAPASTPLLAASATATSAQPMDPRLLMREYPQPAGQTSNXPTQDQVAAMFLPPPPIVDPVQQQPIQQAPPIQPVVQPVQQQVVQPAQQTPPIQPVVQPVQQQVVQPAQQSLPIQPVVQPIQQQVEQPAQQAP

SEQ ID NO: 204361 - protein, 208 aa, Oryza sativa
  unsure (1)..(208): unsure at all Xaa locations
  Clone ID: PAT_MRT4530_99456C.1.pep
TPTPAPRKGAFPDACRRVLPSASGNSSLSPEATIKPCPPCKCPAPNLLGGPSVFIFPPKIKDVLMISLSPIVTCVVVDVSEDDPDVQISWFVNNVEVHTAQTQTHREDYNSTLPAVSALPIQHQDWMSGKEFKCKVNNKDLPAPIXERTISKPKGXVRAPQVYVLPPPEEEMTKKQVTLTCMATDFMPEDIYVEWTNNGETELNYKNT

SEQ ID NO: 204362 - protein, 1463 aa, Oryza sativa
  Clone ID: PAT_MRT4530_99457C.1.pep
MLQQAQDQVLNSFMQPRKGTLVQKYKVKEVKVTTLKGCMEFKTRKGTLVQKYKVKVVADDPGTSSSKGEDGKQAPNGLAQLSDKAATDGSLGSQADNSQGVHGVQGDGAQGLQRGNLNQNSDAAQDFFNNFQDRVDYVVHHALINQSGVLVNTLSNMTKSIADGSIAEHQAAGPVYLQGALADSTDTPESAGCTTNPATSCVTSPANATKATASAADSANAIKIANHSADSAPRLNERIGQGAAQQRPWADVIADVMREQFGLKPKETGSLYRLPYPEWFERVPLNIQFKVPDFSKFLGQDGVSTYEHISRFLAQCGKASVVDALRVRLFQLSLFGSAFTWFSSLPYGFINSWADLEKQFHSYFYSGVHEMKLSDLTAIKQRHDDSEIAAAEWVRSKKVIPCQWVNSSRKEEKYDFDITKADKIFDLLLREKQIQLPAGQTIPSAEELSKKRYCKWYNSGSHSTIDCKVFRQQIQVAIEGGKIKFDDSKKPMRVDGNPFPVNMVHTASRTTDTGRMRGYQVSSARIINKYQRKYDKQQEKHHEEDNGSSDPHWGCEFFRFCWNEGMRLPSIEDCPGCSDVAGGSSRLYDGGNWPKQTRVLVHQRLGPVNQRGDSKDDENKKTEWCPLSIFTKNQKRRVQRLRSRECFQQVEQEINHRLKKAKSRQEWCVKNQAPVADDVAADEAKRLAKGKSVVTAPVNMVFTLPAEFGIDQADVDEVEEESAKLVLSPEQAVFEKPEGTENRHLKPLKLGRNAEDLIKTNIVLKDFGGNPSETKGVLNVELTVGSDKIEIVLADSQLKLENPSYYFEGVVEGSSVYTKDTVDDLDDKQGEGFMSADDLEEIDIGPGDRPRPTFISKNLSLEFRTKLIELLKEFRDCFAWEYYEMPGLSQSIVEHRLPIKPGVRPHQQPPRRCKANMLEPIKAEIKSLYDAGFIRPCQYAEWVSSIVPVIKKNGKVRVCIDFRDLNKATPKDEYPMPVADQLVDAVLGNKILSFMDGNAGYNQIFMAEEDIHKTAFRCSGAIGLFEWVVLTFGLKSAGATYQRAMNYIYHDLIDWLVEVYIDDVVVKSKEIKEHIADLRKVFERPRKYGLKMNPTKCAFGVSDGQFLGFLVHERGIEITQRSINAIKKIKPPENKTELEEMIGKINFVRSTRLRHYLLSNECTIICKANIVRYMLSAPILKGRVGKWIFSLTEFDLRYESPKAIKGQAIADFIVEHRDDSIGSVEMVPWSLFFDGSVCNHGCAECEAVLKGLQLLKEVEADATEIMGDSLLVINQLAGEYECRNDTLIVYNEKCQELMKELWLVTLKHVSREQNIEANDLAQGASGYKPMIKDVKVEIAAITADDWRVLTYLSRLQEFLSPITQKLLRQVLLDSRNSSLPNLFDFFNGLGILSVTTGSNPTGVPYVRVLFLVPGGKTEPQTKPYPLDMWKYGSALQQRPEDRSLYGRGATIKTMHPEPSLKPF

SEQ ID NO: 204363 - protein, 82 aa, Oryza sativa
  Clone ID: PAT_MRT4530_99458C.1.pep
LNIERGNAYLPTRYGHAMAPFMGCAWPPELTLAVLASGGALLDSCMLRARATEGSCLNVGYTVRMDREQAWQEAHIRPYPSA

SEQ ID NO: 204364 - protein, 1182 aa, Oryza sativa
  unsure (1)..(1182): unsure at all Xaa locations
  Clone ID: PAT_MRT4530_99459C.1.pep
LQNQINWHACTPEGKFWTYTGVKQISXASCFTSTRFWHARWDQLEVSKQXFSMAEKPPPSSSSASPGSVKEKIQKLGLSDVNEGNIVTIDQEKFTPDQKKDFEAMMXQARDQFLNSFMQTRKGTLVQKYKIKVVADDPGTSSSKDEEGKQAPDGSAQPXDKGATDGFPANQGDNSQGVRGVQGDGSQGVQDQVDYAVHHAFINQFGILTNTLVDGSMAEYQATGPVYLPGGVYPNYRPLITDNQPIVRSIPLNVPSAQPTAPVSAPAPAPPPSAPGQIINPRLLVREQPQHIGQNVNRLTQDQVASMFLPPQHTIDPTLFIRFSKHPQSSRLCKPVCNTWXSTCAACCESSCSRALGSSRTIGWHNVMKEQFGLRPKDAGNLYRQPYPEWFERVPLPNRFKVPDFSKFSGQDSTLTYEHISXFLAQCGKASAVDALRVRLFRLSLSGSAFTWFSSLPYGSINSWADLEKQFHSYFYSGVHEMKLSDLTSIKQKHDEPVHEYIQRFRXMRNKCYSLSLTDAQLADLAFQGMIPPIRXKFSSEDFENLSHLRQKVTLHEQRFVEARKNXRKVNHVCPYIYGSDDEDDDSEIDAAEWVRSKIVTPCQWVKSSXKEERYDFDITKADKIFDLLLREKQIQLPAGHTIPXAEXLGKKRYCKWHNSGSHTTNDCKIFRQQIQAAIKGGKIKFDDSKRSMKVDGNPFPVNMVHTAGRTADGGRARGFQVNSAKTINKYQRRYDKQQEKHYEEDDDGMRLSSIGDCPRCSDVAESSSRSYSRGNRLRXTRLPVHQRLGPVNQVHGQEDDENRKTAWCPSGIFTKNQKRRKTKPKQEWRVKNQVPVVEEATADEAKRLAKGKSVVTAPINMVFTLPAEFGNKQADIDEVEEESAKLILSPEQAVFEKLEGTENRHLKPLYINCYVNGKPMSKMMVDGGAAVNLMPYTTFRKLGRNAEDLIKTNMVLKDFGGNPSETKGVLNVGLTVGNKTIPTTFFVLDGKGSYSLLVGRDWIHANCCIPSTMHQCLIQWQGDKIEIVLADSQLKMENPSYYFEGVVESSEVCNKDTIDDLDDKQRQGFMSADDLEEIDIGPEFRTKLIELLREFRDCFAWEYYEMLGLSRSIVEHRLPIKPGVRKQEQPTRRCKADMLEPVKAEIKRLYDAGFIRPCRYAEWVSSIFGIILKNDFSPDRE

SEQ ID NO: 204365 - protein, 150 aa, Oryza sativa
  Clone ID: PAT_MRT4530_9945C.1.pep
ELELHLCRSPKIQFMLYETLLKKLKKRRASNLKGADGLTALEIFLLGAVAKLGATVVTYPLLVVKARLQVKQIIDDDKRHRYKGTFDAITKMIRYEGLSGLYKGMSTKIVQSVFASALLFMIKEELVKGARLLVTGNTSLVKKLPSKPLR

SEQ ID NO: 204366 - protein, 1598 aa, Oryza sativa
  Clone ID: PAT_MRT4530_99460C.1.pep
MSPYQIVYGKSCRLPVELEHRAYLAIRNWNMDFEGAGEWRKMKLAEIEEWREKAYHNAKIYKERTKRWHNKRIKIKKFKPGDKVLMFNSRVKLFGHGKLRSKWEGPFDVIDTSSHGAITLCSESGNIFKTRKGTLVQKYKIKVVAADPGTSSSKDGDGKQAPDGSAQLSNQSATDSSLGNQGDNSQGVHGVQGDGVHGVHGVQGDGAQGLQGENLNQNSDTAQDFFSNFQDRVDYAVHHAFINQSRPDGTVIPQVVPEHLVRNIQPNLHNYQGGNLNYQDQPPSPQAQYQPGGLAQPQLAPQYGQFEPMQQQSQGVAQQRPWADVIADVMREQFGLKPKETGSLYWQPYPEWFERVPLPNRFKVPDFSKFLGQDGVSTYEHISRFLAQCGEASAVDALKVRLFRLSLFGSAFTWFSSLPYGSINSWADLEKQFHSYFYSGVHEMKLSELTAIMRRYDEPVHEYIQRFREMRNKCFSLSLTDAQLVDLAFQGMIAPIREKFSSEDFDSLSHLIQKVTLHEHRSAEVRKNSKKVNHVCPYMYGLDDDEDDSEIAVAEWVRSKKVIPCQWVKSSGKEEKYDFDITKADKIFDLLLREKQIQLPAGHTIPSAKELGKKRYCKWHNSGSHSTNDCKVFRQQIQVAIEGGNIRFDDSKKPMNVDAGQTADRARARGFRVNSAKIINKYQKKYDKQQKKHHEKYDDGFDPHWGCEFFRFCWNEDHGQEDDVIRKNQWCPYGIFTKNQKRRVQRLRNREHLQEVEQKINHRLKKAKPRQEWHVKNQVPVADDIAADEAKRLAKGKSVVTAPVNMVFTLPAEFGIDQADVDEVEEESAKLVLSPEQAVIEKPEGTENRHLKPLHINGYVNGKPMSKMMVDGGAAVNLMPYATFRKLGRNIEDLIKTNMVLKDFGGNPSETKGVLNVELTVGSKTVPTTFFVIDGKGSYSLLLGRDWIHANCCIPSTMYQCLIQWQGDKIEIVPVDSQLKMENPIYYFEGVVEGSSVYTTDMVDDLDDKQGQGFMSADDLEEVDIGPGDRPRPTFISRNLSPEFRTKLIELLKEFRDCFAWEYYEMPGLSRLIVEHRLPIKPGVRPHQQPPRRCKADMLEPVKAEIKRLYDAGFIRPCRYAECVSSIVPVIKKNSKVRVCIDFRNLNKATLKDEYPIPVADQLVDASSGLKILSFMDGNAGYNQIFMAEEDIHKTAFRCPGAIGLFEWVVMTFGLKSAGATYQRAMNYIYHDLIGWLVEVYIDDVVVKSKEIKDHIVDLRKVFERTRKYGLKMNPTKCAFGVSAGQFLGFLVHERGIEVTQRSVNAIKKIQPPENKTELQEMIGKINFVRRIISNLSGRLEPFAPLLRLKADQQFTWEAEQQKALDNIKEYLSCPPVLILPQKGIPFRLYLSAGEKSIGSVLIQELEGKERVVFYLSRRLLDAKTRYSPVEKLCLCLYFSCTRLRHYLLSNECIVVCKADVVKYMLSAPILKGRVGKWIFSLTEFDLRYESPKAIKGQAIADFIVEHRDDSIGSVEIVPWTLFFDGSVCTHGCGICLVIISPRGACFEFAYTIKPGACFEFAYTIKPYVTNNQAEYEAVLKGLQLLKEVEADTIEIMG

SEQ ID NO: 204367 - protein, 67 aa, Oryza sativa
  Clone ID: PAT_MRT4530_99461C.1.pep
LVGASTRRRRRRRRRRRRPPRWPRTLSLRPRRRQPPPSAASSTASAAPRPTSSSPPRRRGGLEPPLR

SEQ ID NO: 204368 - protein, 148 aa, Oryza sativa
  unsure (1)..(148): unsure at all Xaa locations
  Clone ID: PAT_MRT4530_99462C.1.pep
APTRPLSPFWNIYAHSVVYITQGRARGQVVNNNVKTVFNGELRRVQLLIIPQHYAFVKNAQREXCADIASKTNPSSMASHISRQSFILRALPNDVLAHAYRISREEAHTLMHTRGDEFCAFTPMQCTSYQDVDNATESSYVSLRIKND

SEQ ID NO: 204369 - protein, 497 aa, Oryza sativa
  Clone ID: PAT_MRT4530_99463C.1.pep
MTLPSPRMVVPAKDQSPDKPSGFRKSINPIYADAVVVDMAAAAARPSRTAAAAAVEDDDDGGAAPALVRRHTGGAGDGRWEAIRAASARESPLSLGHFRLLRRLGYGDIGSVYLVELRGGGSGALFAMKVMDKSSLVSRNKLARAQTEREILGLLDHPFLPTLYSHFETDKFYCLLMEFCSGGNLHSLRQKQPNKCFSEHAARFYASEVLLALEYLHMLGVVYRDLKPENVLVREEGHIMLSDFDLSLRCSVSPALVRSPSGRVGAGAGLVHGCVLPRILPRRSGKKKKKQKGNDQEVTSATGDGNGKNRPPPATSLEFTAEPTGARSMSFVGTHEYLAPEIIRGEGHGSAVDWWTFGVFLYELLHGTTPFKGSGNRATLFNVVGQPLRFPDAPAASAAARDLIRGLLVKEPQSRLAYRRGATEVKQHPFFDGVNWALVRSAMPPYIPEADVAAAAVDCRSPLARATQGGGTPKKSAAGGKASSPRDDPSYVEFEYF

SEQ ID NO: 204370 - protein, 369 aa, Oryza sativa
  Clone ID: PAT_MRT4530_99464C.1.pep
MARKGKDLISQLPDDILVHILSMVRYKEAVRTTVVSRRWKHLHTKLPAVSFTMSVLGLQGSPLSTQSKQRVESMARTLRRRCAGPDHDTVQRLRLSYRKDVPMECRYADEFIALAAASSLVLFLNCPKNLRNNDAGPWSLHLPAATPCLSMESCWYSVRPPHVHGPGASALKSLTFKDSFMVLHPGYLQDTAFPSLEELQISGCTLSGSIEITSATMPRLKHLRIVDVSIISLGTEAAITVLADELATLRVSCHDGGKPDPPASHEMLCVETPFRASFTEYSCFRLRAPKLRVFEWRCSYAKEVRVDAVGRLSDVVIELFAGRLPRCYNEAKRFLQMEDCDKLMKHILQGIMPGRWKYVQRLSSDSQLR

SEQ ID NO: 204371 - protein, 145 aa, Oryza sativa
  Clone ID: PAT_MRT4530_99465C.1.pep
MPKIKTSGVKYPDGWELIEPTLSELHSKMREAENDPHDGRRKCEALWPIFKINHQRSRYLYDLYYNRKEISQELYEFCLDQGHADRNLIAKWKKQGYERLCCLRCIQTRDHNFATTCVCRVPKHLREEQVIECVHCGCKGCASGD

SEQ ID NO: 204372 - protein, 89 aa, Oryza sativa
  Clone ID: PAT_MRT4530_99466C.1.pep
LFTQTLHNSRGGFIKNMGFFNNITIRGNQSSINTLNDLASINKPKSPYNTNTVNYPSNRLLYTTLIVNLPLIYVKPLNYLTKELLEQLL

SEQ ID NO: 204373 - protein, 1094 aa, Oryza sativa
  Clone ID: PAT_MRT4530_99467C.1.pep
MYIKKVVIEGFKSYREEISTEPFSPKVNVVVGANGSGKSNFFHAIRFVLSDMFQNLRSEDRGALLHEGAGHSVVSAFVEIVFDNSDNRIPVDKEEVRLRRTVASKKDEYYLDGKHVSKTEVMNLLESAGFSRSNPYYVVQQGKIASLTLMKDSERLDLLKEIGANKRKQIDQVVHYLEERLRELDEEKEELKKYQQLDKQRRSLEYTILDHELNEARNELASMDDNRRKISERMSHADNEVVDVREKVKTFDKEIKYSTKGINDTKAQKEGVEKKRTEALKVVAQIELDLRDIKDRILNEKRAKDEAAKDLQSVRMESEKSKSELAEISKVHQAKLKEEEEISKSIMDREKRLSILYQKQGRATQFANKAARDKWLQKEIDDLERVLLSNRKQEGLLQEEIQKLKDEINNLNSYIESRKSESSKLESALAKKHNDYNDLRKQRDELQEERKSFWKEEADVTAEIDRLKDDLVKAQKSLDHATPGDIRRGLNSVSRIIRDHGITGVFGPVLELVDCEEKFFTAVEVTAGNRTVICRDLETATKVARGNGLDCITLDGDQVARKGGMTGGFYDSRRSKLKFVKIIRDNKTAIEKKAAHLENQMDAERDHAKSELEQFKVDIASAMKQMVSLDKALGKKEKSLDNIRNQIEQIQSGIAMKNDEMGTELIDQLTSEERDLLSRLNPEITELKEKFLLCKNSRIEIETRKEELETNLSTNLMRRQKELEAIISSADSKTLPLEAESKEQELKSSKRSLDELTAMLKANVDAINNFTRKMEELKRQRDDLKALEANLEQTVQDGAKDLEQLMSSRSMHLAKQEECMKKIRDLGSLPADAFETYKRKNKKQLQKMLYDCNEQLQQFSHVNKKALDQYVNFTEQREQLQRRRAELDAGDQKIRELISVLDQRKDESIERTFKGVARHFREVFSELVQGGHGHLVMMRKKDGDADDDDNDEDGPREPDPEGRIEKYIGVKVKVSFTGKGETQSMKQLSGGQKTVVALTLIFAIQRCDPAPFYLFDEIDAALDPQYRTAVGNMIRRLADMADTQFIATTFRPEIAKVADKIYGVTHKNRVSYINVVSKEQALDFIEHDQTHNAS

SEQ ID NO: 204374 - protein, 659 aa, Oryza sativa
  Clone ID: PAT_MRT4530_99468C.1.pep
MSRALLPRGSILLVLRPRVPSTPHRCFAIGAAAAVDGGETWRGQLRQGEGEGRSRAVKVSVWWDFQSCHLPQGANPCRVATRVTAALRDAGIRGPVDITALGDAYMLPRAVQEALAATGVAFSHVPSSFVFQTHPNFVTHRKSDDSMAESEDSLAESRDSKAFQPHTNLPNLRAELRKNHVFMDKGLFGFKNFSSLLQAMPDVVKFIDPLPGERNQPAVVGVSKRSMEPAEQIYKGKSSAQSSGEFKRLVQTLNEKPPSSHVPSSSSDILSADRKKVLAVDAPSSQSDLLSRNQEKAPPVDLTTQPETPASCMEADVESVAGASAFTGEQITVDKKGLFERICVLWNDTEPVKPMLSPSQDDTHSKGSNDLLTQYANSNEHNSLLTRTLKIFSTTDNSDGDNVDSTSAISSSFSNMTANDHSDKLNVKENVGNTIIHSSRSVDTSNAEHKVGFIEKSKGIFSWAAKWWASGKPDTDDNLSSVHINDGTREESEKESAFVKTAATASEQQVGVELFMKPYFWDALQQYLSTPHGSDLVSKAKTSKKQHGIGGIVDCSRINRAQDYLGNDPNGGFLLVYFAGLDGGEGEHEEASAEAAVEEVGGERGVAAGEGGVVVREVRGAVGVLGVRADGLEGRLRAEGSPELGRRRRGNADEAVAAA

SEQ ID NO: 204375 - protein, 126 aa, Oryza sativa
  Clone ID: PAT_MRT4530_99469C.1.pep
KIRKCTDIPSTYPDREDLSDLKSCHHLYTYLKREMSELHRNRHWENIWSIHAKPRMNGDRGVRPNQRVRSNLGWALLAWPSVDVGGMDCHLTTANNGAWHRVHEIDRRKTKAMFVCSLEPVPNWNS

SEQ ID NO: 204376 - protein, 92 aa, Oryza sativa
  Clone ID: PAT_MRT4530_9946C.1.pep
RILNALGHSAKYTMLTAGFVLQPTPTYWVTWCHDNHLACVFCILSSLLPIDHDGVPVLPILGAHENVAIEKKGALYLVPVKKVHFKLMKQTK

SEQ ID NO: 204377 - protein, 515 aa, Oryza sativa
  unsure (1)..(515): unsure at all Xaa locations
  Clone ID: PAT_MRT4530_99470C.1.pep
MAKKKERAVNVSGKPRHSLDVNRANDKKGAGGGAGGGGGGRSAATVRRLKMYKMRPLRDRGGKILKHDLQSKELPNTRIEPDRRWFGNTRVVNQKELEFFREELQSRLSNNYNVILKERKLPLSLLQDHQKQARAHLLDTEPFEHAFGPKGKRKRPKLMALDYESLLKKADDSQGAFEDKHATVVHLKQLNLLDKSDEEGVSSDRTAAAMKAIAGIISSQQQMNVPCQKEFGVTNEDSEXRGAIRVIYKRLGTLHDKEQGTILPNTXRFYEDLVSNRNVTMNVTIVQFTGAFYCNERPESRVWDWETSVTSYIVWAFVVDQIECFGSLIXHFVPTVLETNLFRYINSAKXIRICMGSKETDIVLKGVVRVTNLADASEHIGEVLRRVKKEHLKRAYKIEDWVDDNDFLVQLSKTTGKLLRGGEPDLTTTAKMVLHDWQRGKIPFFVPPPQQGEDSPSETAEPVEKSDEEGVSSDRTAAAMKAIAGIISSQQQMNVPCQKEFGVTNEDSEVAEQSE

SEQ ID NO: 204378 - protein, 166 aa, Oryza sativa
  unsure (1)..(166): unsure at all Xaa locations
  Clone ID: PAT_MRT4530_99471C.1.pep
GTNGGHQRVADGTANSPATKATAEEERTAPAARLKRRRSSGRRRQREGRFRVRRRETKPIRSRIQRFPNRFSRCFQRRKGGGDPEDHFPSINSAGEGKKRPDLEGNDGGAALGFRTAAARRRRRXLTGGTHLSATARARLRTGPDWAEERENGFGPTFGPKPKETF

SEQ ID NO: 204379 - protein, 71 aa, Oryza sativa
  unsure (1)..(71): unsure at all Xaa locations
  Clone ID: PAT_MRT4530_99472C.1.pep
SRXRLXPRLILQXSPRAFPWWRRRRRRXPPLAAGSSGXHXPPSFGADEPEHHHLDTHFSSFSQVLVKCVYV

SEQ ID NO: 204380 - protein, 122 aa, Oryza sativa
  unsure (1)..(122): unsure at all Xaa locations
  Clone ID: PAT_MRT4530_99473C.1.pep
EEGWRRSAGECGGDISRRTGEXAXAAXSWPAARNKKKHAGXGGEPTVDRGRGAITGERIEGFHFIGEKREPPTGETGTGGGIRGRRPXKVTGVGAGVPDDWGHESRGKLGGIEQEGKGINSP

SEQ ID NO: 204381 - protein, 168 aa, Oryza sativa
  Clone ID: PAT_MRT4530_99474C.1.pep
MLVYQDLLTGDELLSDSFPYKEIENGILWEVEGKWVTVGAVDVNIGANPSAEEGGEDEGVDDSTQKVVDIVDTFRLQEQPTYDKKGFIAYIKKYIKLLTPKLSEEDQAVFKKGIEGATKFLLPRLSDFQFFVGEGMHDDSTLVFAYYKEGSTNPTFLYFAHGLKKNKC

SEQ ID NO: 204382 - protein, 106 aa, Oryza sativa
  Clone ID: PAT_MRT4530_99475C.1.pep
HHSPQVHRSTAPSPLLSSVSRPPSASAAAPRAGAVSPGCGGGVPTFSSGVNERDVIVANPELCRWAGRRGREDRRWGGVEEEDEREARGLVAVYLRSPPPWSSACS

SEQ ID NO: 204383 - protein, 129 aa, Oryza sativa
  Clone ID: PAT_MRT4530_99476C.1.pep
MGFYILRLCGYPHSGGDAGEQTIPPRRRLSASPAGGRPLPPSTHWLRQGVLTRGRSLPAHSIDSPAGVACGARRRRPPRQAALLGFLRIRGSWYAPVILFASSRHPFGLGISSANFLVRLRLYAVEFQG

SEQ ID NO: 204384 - protein, 867 aa, Oryza sativa
  unsure (1)..(867): unsure at all Xaa locations
  Clone ID: PAT_MRT4530_99477C.1.pep
MGRRGGGGQAGGAWIGGCVLALAATLVVCVLVIRGAGGLKQYHAPAFARKILLSITGGHPQDNLNIVLHPSQLQTPRLQSLGLNVKPPAATSRRVNVQQELYAPSPTISHRGPAVSPASIIHPTNHGKAHGVPIAAHSKERHHHSMLVNNTHGNTHAGPVVAPPKGRHHHSLPVNNTRVKGPAYSPSNSPSIHRKHGIPVAAPPKQHSSNLPPSHHRPHKGMLTVPSPTPHKADNKKKTKHGRSGLHHSPAPAPVGLPPSEGNARGNPAYAPRHPHEYHSPSNSPEPGLPPVNPPDSHAFKKPKSLAPAPQSFPPPPLSSYCMALNCQDPLTNSLPGTTCLCVWPIKVELRLGIALYTFFALVSELAQDIASGVLMKQSQVRVMGANAATEDPEKTVVLIDLVPLGEKFDKATALLVFERFWHKQVNINSMHFGNYDVLYVTYQGLPPSPPTAPGMNNGLSNVNDPRLHPLAVDVGNHRETKSRGIIVIIVLSSVFAFILCSGAALVICFKIRNRNHLTEESPMPPKPAGPGSAVVGSRLGSRPISASPSFSSSIVTYKGTAKTFSLIEMERATQRFDNSRIIGEGGFGRVYEGILEDGERVAVKILKRDDQQGTREFLAEVEMLSRLHHRNLVKLIGICTDAFKFSRLHGVKLSRSSDQXLPGTTCLCVWPIKVELRLGIALYTFFALVSELAQDIASGVLMKQSQVRVMGANAATEDPEKTVVLIDLVPLGEKFDKATALLVFERFWHKQVNINPLHKSDVYSYGVVHQGLPPGTKPVDILRPPGQENLVAWACPFLTSRDGLETIIDPSLGNSILFDSIAKVAAIASMCVQPYVDQRPYVCGVARTLTSKIEATGSLAAASRVG

SEQ ID NO: 204385 - protein, 91 aa, Oryza sativa
  unsure (1)..(91): unsure at all Xaa locations
  Clone ID: PAT_MRT4530_99478C.1.pep
TRPRHAEKDFDIKREACGKSFTAVYKSYTATVSKNFLEIHLFWAGKGTWCIPIQGYYRPLILTLSITSNFTSTGRNGXPKGKGKVGPLVGY

SEQ ID NO: 204386 - protein, 129 aa, Oryza sativa
  Clone ID: PAT_MRT4530_99479C.1.pep
EFLAELEMLSRLHHRNLVKLIGICTEEHIRCLVYELVPNGSVESHLHGSDKGTAPLDWDARLKIALGAARALAYLHEDSSPRVIHRDFKSSNILLEHDFTPKVSDFGLARTAIGEGNEHISTRVMGTFG

SEQ ID NO: 204387 - protein, 81 aa, Oryza sativa
  Clone ID: PAT_MRT4530_9947C.1.pep
MGCLQRWEKHYRCQFSLVLAIPAPIMPTYMCPFSSEISESYSEGIRMLSYRVGSVVFKFYLETKMICGINRHPREVQGTES

SEQ ID NO: 204388 - protein, 257 aa, Oryza sativa
  Clone ID: PAT_MRT4530_99480C.1.pep
MGRRGGGGRALCAWIGGCVLALAATLVVCVLVIRGAGGLKQYHAPAFARKILLSITSGHPQDNLNIVLHPSQLQTPRLQSLGLNVKPPAATSRRVNVQQELYAPSPTISHRGLAIPPLPTTSPPVFPPPIRSYPPLPANKPYPNRPAVSPASIIHPTNHGKAHGVPIAAHSKERHHHFMLVNNTHGNTHAGPVVAPPKGRHHHSLPVNNTRVKGPAYSPSNSPSIHRKHGIPVAAPPKQHSSNLPPSHHRPHKGMLT

SEQ ID NO: 204389 - protein, 24 aa, Oryza sativa
  Clone ID: PAT_MRT4530_99481C.1.pep
ADRCSRDIRRARTVVLQRIIHHPN

SEQ ID NO: 204390 - protein, 51 aa, Oryza sativa
  Clone ID: PAT_MRT4530_99482C.1.pep
YDTLDASGSFRRYSSSGPLRVGRTGHNRERGLSTGSSSEHCGTQRFRIDSE

SEQ ID NO: 204391 - protein, 273 aa, Oryza sativa
  unsure (1)..(273): unsure at all Xaa locations
  Clone ID: PAT_MRT4530_99483C.1.pep
SWDKLRPGGHPWSPKMRILGKDLISAFSPPFFCLFSQSKIWQNGSFWPTMYEDTKEFIQRCARCQKHVGITARDAMPLTYNIQVELFNVWGINYMKPFPKSHDCEHILVAVDYVSMVITNXGSHFIDKTSKNFLQELGAQHNIATPYRPQTGGKVETYNKQIKNIPQKAVNERGKXWKHKLPDALWACRTAYKTSIGMSPYXLVYEKTCHLPVELEHRAHWAIRTXNMDLGQVGRHQHMHLSELEEWRDTFYHNNRMCKKQTKVXHYRRIKVK

SEQ ID NO: 204392 - protein, 437 aa, Oryza sativa
  Clone ID: PAT_MRT4530_99484C.1.pep
MCAARSFPNWVMLERFIFRVDDDKEFPDDVIRASGLTSQENPFHVAFRLSNPPGISRIYVQLPGFPNSRNVLPFSVVATHRHLVLFSLISTVKDQIDVQDLVIYDASATLQTLPPCTELDNVLLRMIAAWPQVVLAQLCLLRSHISKVASSGWRTIRLPIHVHGNPDDVHQLYSWKTDTVIPFDNQLCWIDYMRGILFYDPAAIVVSFLPFPVDHETPRRNKECFWLYRGVSVLDASGVLKFIDVARDDGLGFESLRRDAGFTVTCYSLVLGEHKKKKKKHRRTMEWREDYKITSNELWSINSLDCLPRTLLMFPQVDIDRPHIVHFLAPELRYVIKKMWVVAIDMNTKIVESSSLYINGKEDLQTEDAGLTRAKSRFPQSFLPSDFSKFITFSSTSSCPATILLSSKYAMVPGEDSVVSRHWLKELFHVVVYFYAV

SEQ ID NO: 204393 - protein, 101 aa, Oryza sativa
  Clone ID: PAT_MRT4530_99485C.1.pep
MAMLGRKRGGSSSAKLPPHAEDPRAAPPPPQAGLTATDGGQEVAMSQFVAQLGMCEASARVAKAFYEAARKRLDSMNQRLRWLEQQMETLEAEVGKASSAD

SEQ ID NO: 204394 - protein, 1558 aa, Oryza sativa
  unsure (1)..(1558): unsure at all Xaa locations
  Clone ID: PAT_MRT4530_99486C.1.pep
MQQQPQGAAQQRPWADVIADVMREQFGLKLKENGNLYRQPYPEWFERVPLPNRFKVPDFSKFSGQEGVSTYEHISRFLAQCGEASAVDALKVSWADLDKQFHSYFYSGVHEMKLSDLTAIKQRHDEPVHEYIQRIREMRNKCFSLSLTDAQLADLAFQGMIPPIREKFSSEDFDSLSHLIQKVTLHEHRSAEVRKSSKKVNHVCPYMYGSDDEEDDSEIAAAEWEEKYDFDITKADKIFDLLHREKQILLPAGHTIPSAEELGKKRYCKWHNSGSHSTNDCKVFRQQIQVAIEGGKIRFVDSKKPMKVDGNHFPVNMVHTASQAADRARAKGFQVNSAKIINKYQRKYDKQQEGHYEEYDDGFDPHWGCEFFRFCWNEGMRLPSIENYPRCSDIIESSSRLYNRGNRLRQARLPVYQWLGPVNQDRGQEDEVIKKNQWCPSGIFTKNQKRRVQRLRNRERFQEVEEEINHRLRKPKPRQEWRVKNQVPIADDAAADEAKRLAKGKSVVAAPINMVFTLPAEFGIDQADVDEVEEGSTKLVLSPEHVVFEKPEGTENRHLKPLYINGYVNGKPMSKMMVDGGAAVNLMPYATFRKLGRNAEDLIKTNMVLNDFGGNPSETRGVLNVELTVGSKTIPTTFFVIDGKGSYSLLLGRDWIHANCCIPSTMHQCLIQWQGDKIEIVLADSQSKMENPSYYFEGVVEGSNVYAKDTVDDLDDKQXRSIVEHRLPIKXGVRPRQQPPRRCKADMLEPVKAEIKRLYDAGFIHPCRYAEWVSSIVPVIKKNGKVRVCIDFRDLNKATPKDEYPMPVADQLVDAASGNKILSFMDGNAGYNQIFMAEEDIHMTVFRCPGAIGLFEWVVMTVGLKSAGATYQRAMNYIYHDLIGWLVEVYIDDVVVKSKEVEDHIANLRRVFERTRKYGLKMNPTRCAFGVSAGQFLGFLVHERGIEVTQRSVNAIKKIQPPENKTELQEMIGKINFVRRFISNLSERLEPFTPLLRLKADQQFTWGTEQQKALDNIKEYLSSPPVLIPPQKGIPFRLYLSAVIISPRRACFEFAYTIKPYATNNQAEYEAVLKGLQLLKEVEADTIEIMGDSLLVISQLAGEYECKNDTLMVYNEKCLELMKEFRLVTLKHVSREQNLEANDLAQGASGYKPMIKDVKVEIAAMSADDWRYDVHQYLSNPSQSASRKLRYKALKYTLLDDELYYRMIDGVLLKWLSADQAKVAIGEVHEGICGTHQSAHKMKWLLRRAGYFWPTMLEDCFRYYKGCQDCQKFAAIQQAPASAMNPIIKPWPFRGWGIDMIGMINPSSSKGHKFILVATDYFTKWVEAIPLKKVDYGDAIQFVQEHIIYRFGLPQTITTDQGSIFVSDEFVQFADSVGIKLLNSSPYYAQANGQAEASNKSLIKLVKQKISDYPRQWHTRLAEALWSYRMACHGSIQVPXIEAVLPWEVRIGSRRTELQNDLTADEYYNLMANEREDLVQSRLRALAKVTKDKERVARHYNKKVISKDFLEGELVWKLILPIGTRDSKFGKWSPNWEGPFQIHKVVSKGAYMLQGLDG

SEQ ID NO: 204395 - protein, 84 aa, Oryza sativa
  Clone ID: PAT_MRT4530_99487C.1.pep
MKEIRSAPEPSALTPSHTSSQGSNAMLGKRRLDAMDFSTMVLDLGAKQGSREDSNLKRPPPISSSGSVHSEGRFGQSIRHVGPT

SEQ ID NO: 204396 - protein, 1542 aa, Oryza sativa
  unsure (1)..(1542): unsure at all Xaa locations
  Clone ID: PAT_MRT4530_99488C.1.pep
MAPDQPVNPRLLMREQPQHGGQVANRLTQDQVAATFLPPQPIVDPIQXSRFSRHPQFSRRIGRVCNAWWSACTTIFKSSCPRTLGSPCTVRWHXVIPQVVPEHLPYPEWFERVPLPNRFKVPDFSKFSGQDGVSTYEHISRFLAQCGEASVVDALKVRLFRLSLSGSAFTWFSSLPYGSINSWADLEKQFHSYFYSGVHEMKLSDLIAIKQRHDEPVHEYIQRFREMRNKCFSLSLTDAQLADLAFQGMIAPIREKFSSEDFDSLSHLIQKVTLHEHRSAEVRKNSKKVNHAYPYMYGSDDDKDDSEIAAAEWVRSKKVIPCQWVKSSGKEEKYDFDITKADKIFDLLLREKQIQLPTGHTIPSAEELGKKRYCKWHNSGFHSTNDCKVFRQQIQVAIEGGKIRFDDSKKPMKVDGNLFPVNMVHTASQTADRARARGFQVNSAKIINKYQKKYDKQQEKHHEKYDDGMRLPSIENCPGCSDIVENSSRSYNRGNRLRQTRVSVHQRLGPVNQDHGQEDNVIRKNQWCPSGIFKKNQKRRKAKPRQEWRVKNQVPVADDVAADEAKRLAKGKSVVTAPVNMVFTLPAEFGIDHADVDEMVDGGAAVNLMPYATFRKLGRNAEDLIKTNMVLKDFGGNPSETKGVLNVELTVGSKTIPTTFFIIDGKGSYSLLLGRDWIHANSCIPSTMHQCLIQWQGDNIEIVPADSQLKMENPSYYFEGVVEGSNVYTKDTVDDLDDKQGVRPHQQPPRRCKADMLEPVKAEIKRLYDAGFIRPCRYVEWVSSIVPVIKKNGKVRVCIDFRNLNKATPKDEYPMPVADQLVDAASGHKILSFMDGNAGYNQIFMAEEDIHKIAFRCPGAIGLFEWVFMTFGLKSAGATYQRAMNYIYHDLIGWLVEVYIDDVVVKSKEIEDHIADLRKVFERTRKYGLKMNPTKCAFGVSAGQFLGFLVHERGIEVTQRSVNAIKKIQSPENKTELQEMIGKINFVRRFISNLSGRLRHYLQSNECTVICKADVVKYMLSAPILKGRVGKWIFSLTKFDLQYESPKAIKGQAIADFIVEHRDDSIGSVEIMPWTLFFDGSVCTHGCGISLVIISPRGACFEFAYTIKPYATNNQAEYEAVLKGLQLLKEVEVDTIEIMGDSLLVISQLVGEYECKNDTLMVYNEKCQELMKEFRLVTLKHVSREQNIEANDLAQGASGYKPMIKDVKVEIAAMTADDWRECQDCQKFGAIQRAPASAMNPIIKPWPFRGWRIDMIGMINPPSSKGHKFILVATDYFTKWVEVIPLKKVDYGDAIQFVQEYIIYRFGIPQTITTDQGSIFVSDEFVQFADSMGIKLLNSSPYYAQDNGQAEASNKSLIKLINRKISDYPRQWHTRLAEALWSYRMACHGSIQVPPYKLVYGHEAVLPWEVRIGSRRTELQNDLIADEYYNLMADEREDLVQSRLRALAKVTKDKERIARHFNKKVVPKDFSEGELIWKLILPIGTRDSKFGKWSPNWEGLFQIYKVVSKGAYMLHGFDGEVYGRALNGKYLKKYYPSVWVNA

SEQ ID NO: 204397 - protein, 1378 aa, Oryza sativa
  Clone ID: PAT_MRT4530_99489C.1.pep
MAELDPGFTGGELVARLELRLLGAHRDARQGWGCLQIHSDGEAPWRHGTTPGMTSAARSIDGNSDDVAAAVRRARSKAPVCTAAFPSIGCTREDEIKRRNIRHGEESMERKRRGNDRGSSTIPAIVLFAAGDGETVEKGSEDALPRMDRHWNASILNVLTRLTSVDFTETRKGTLVQKYKIKVVADDPGTSSSKDGDGKQAPDGSAQLSNKSATDSSLGNQGDNSQGVHGVQGDGVHGVQGDGAEGLQGGNLNQNSDAAQDFFSNFQDRVDYTVHHALINQSGVLVNTLSNMMKSIADGSIAEHQAAGPVYLQGGVFPNYRSLINDVQPSTQAVPSVAPTSQPTALASTPLPVPSAMALGQPVNPRLLIREQPQHGGQVVNRLTQDQVAATFLPPQSIVDPIQQQPIQQTPPIQQVVQPIQQQPDGTVIPQVVPERLVRNTQPNLHNYQGGNLNYQYQSPSPQAQYQPGGLAQPQFAPQYGQFEPMQQQSQGVAQQQPWADVIADIMREQFGLKPKETGSLYRQPYSEWFERVPLPNRFKVPDFSKFSGQDAIKQWHDEPVHEYIQRFRETRNKCFSLCLTDAQLADLAFQGMIAPIRKKFSSEDFDSLSHLIQKVTLHEHRSAEVSKNSKKVNHVCPYMYGSDDDENNSEIAAAEWVRSKKVIPCQWVKSSGKEEKYDFDITKADKIFDCYSERSKFNFLLVFRKQIQVAIEGGKIRIDDSKKPMKVDGNPFPVNMKKYDKQQEKHHEKYDDGFDPHWGCEFFRFCWNEGMRLPSIENSRGCSDIVESSSRSYNRGNRLRQTRVSIHQRLGPVNQDHGQKENVIRKTQWCPSGIFTKNQKRRVQRLRNKERLQEVEQEVNHRLKKAKPRQEWRVKNQVPIADDVAADEAKRLAKGKSVVTAPVNMVFTLPAEFGIDEADVDEVEEESAKLVPSPEQAVFEKPEGAENRHLKPLYINGYVNRKPMSKMMVDGGAAVNLMPYATFRKLGRNAEDVIKTNMVLKDFGGNPLETKGVLNVELTVSSKTIPTTFFVIDGKGSYSLFLGRDWIHANCCIPSTMHQCLIQWQGDKIEIVPADSQLNMENPSYYFEGVVEGSNVYTKDTVDDLDDKTKLIELLKEFRDCFAWEYYEMPGLSRSIVEHRLPIKPGVRPRQQPPRRCKADMLEPVMAEIKRLYDAGFIRPCRYAEWVSSIIPVIKKNGKSAGATYQRAMNYIYHDLIGWLVEVYIDDVVIKSKELEDHIADLRKVFERTRKYGLKMNPTKCAFGVSAGQFLGILVHERGIEVTQRSVNAIKKIQPPENKTELQEMIDKINFVRRFISNLSGRLEPFTPLLRLKTDQQFIWGAEQQKSLDNIKEYLSSPPVLIPPQKGIPFRLYLSAG

SEQ ID NO: 204398 - protein, 345 aa, Oryza sativa
  Clone ID: PAT_MRT4530_9948C.1.pep
MAARRGPHVIKLHDSAPALLGRAPMPPPPGPRDELPPPSAVLVHHPRGGLAPHPAVAALEDRLAVRDRDIQELLVDNQRFAATHVALQQQLIAAQHELRVVSIAATRARAEREDEVRALAEQAARIEAEARAAVAARAEVDQVHADVQVLAGARTELVDRLQDLRGQLARFQAEAGKTESVRAQVETMRREIQKGRAAVEFEKKAHADNLEQSKAMEKNMIAVASEIEKLRGDLANAEKRATAVTATAPVANPGFPTTYGNSEATYPAPAAYGNSETTYAPTYGNTEAAYASTYGSSEAAYAAAYGNSDAYSTNQAHTRTDGNPHYMAPPVHYAQYDSQHTNVQR

SEQ ID NO: 204399 - protein, 126 aa, Oryza sativa
  Clone ID: PAT_MRT4530_99490C.1.pep
MLRPVARSVATSAPSPSAAAAGMAVQNGGGDGSGSGAASVVVNVYDLTPMNNYLYWFGLGIFHSGIEVHGVEYGFGAHEFPTSGVFEVEPKNCPGFVYRRSVRMGTTGMSRAEFRSFIEKLTGSQW

SEQ ID NO: 204400 - protein, 1565 aa, Oryza sativa
  unsure (1)..(1565): unsure at all Xaa locations
  Clone ID: PAT_MRT4530_99491C.1.pep
MPQMVPEHQPGGLAQPQFASQYGQFEPMQQQPQGAAQQRPWADVIADVMREQFGLKPKETGSLYRQPYPEWFERVPLPNRFKIPDFSKFSGQEGVSTYVHISRFLAQCGEASAVDALKVRLFWLSLSGSAFTWFSFLPYGSINSWADLEKQFHSYFYSGVHEMKLSDLTAIKQQHDEPVHKYIQRFREMRNKCFSLSLTDAQLADLAFQGMIPPIREKFSSEDFDSLSHLIQKVTLHEHWSAEVRKSSKKVNHVCPYMYGSNDKEDDSEIAAAEWVRSKKVIPCQWVKSPGKEEKYDFDIMTLIXTKADKIFDLLLXEKQIQLPAXVFRQQIQVAIEGGKIRFDDSKKPMKVDAGQAADRVRAKGFQVNSAKIIDKYQGKYDKQQERHYEEYDDGMRLPSIENCPGCSDIVESSSRSYSRGNRLRQARLPVHQRLGPMNQDRGQEGEKPKPRQEWRVKNQVPIADDAAADEAKRLAKGKSVIAAPINMVFTLPAEFRIDQADVDEVEEGSAKLVLSPEQAVFEKPEGTENWHLKPLYINGYVNGKPMSKMMVDGGAAVHLMPYATFRKLGRNAEDLIKTNMVLKDFGGNPSETRGVLNVELTVGNKTIPTTFFVIDGKGSYSLLLGRDWIHANCCIPSTMHQCLIQWQGNKIEIVPADSQSKMENPSYYFEGVVKGSNVYTEDTVDDLDDKEGQGFMSVDELEEIDIGPGDRPRPTFISKNLSPEFRTKLIELLKEFRDCFAWEYYEMPGLSRSIVEHRLPIKPGVRPCQQPPRRCKADMLEPVKAEIKRLYDAGFIHPCRYAEWVSSIVPVIKKNGKVRVCIDFRDLNKATPKDEYPMPVADQLVDAASGNKILSFMDGNAGYNQIFMAEEDIHKTAFRYPGAIGLFEWVVMSFGWKLSGATYQRAMNYIYHDLIGWLVEVYIDNVVVKSKEVEDHIADLRKVFERTRKYGLKMNPTKCAFGVSAGQFLGFLVHERGIEVTQRSVNASKKIQPPENKTELQEMIGKINFVRRFISNLSGRLEPFTPLLRLKADQQFTWGAEQQKALDNIKEYLSSPHVLIPPQKGIPLRLYLSAAEYEAVLKGLQLLKEVEADTIEIMGNSLLVISQLAGEYECKNDTLMVYNEKCLELMKEFRLVTLKHVSREQNLEANDLAQGTSGYKPMIKDVKVEIAAMSADDWRYDVHQYLSNPSQSASRKLRYKALKYTLLDDELYYRTIDGVLLKCLSADQAKVAIGEVHEGICDIIQDCQKFEAIQRAPTSAMNPIIKPWPFRGWGIDMIGMINPPSSKGHKFILVATDYFTKWVEAIPLKKVDSGDAIQFVQEHIIYRFSLPQTIIMDQGSIFVSDEFVQFADSVGIKLLNSSPYYAQANGQVEASNKSLIKLIKREISDYPRQWHTQLAEALWSYRMACHGLIQVPPYKLVYGHEAVLPWEVRIGSRRTELQNDLTADEYYNLMADEREDLVQSRLRALAKVTRDKERVARHYNKKVVPKDFSEGELVWKLILPIGTRDSKFGKWSPNWEGPFQIHKVVSKGAYMLQGLDGEVYGRALNGKYLKKYYPSVWVNA

SEQ ID NO: 204401 - protein, 1001 aa, Oryza sativa
  Clone ID: PAT_MRT4530_99492C.1.pep
MAAAAATSTLLLLLLLLLLATATHGAAADTVSSPASPEAAALLNLSAALGDPSGYLSTHWTHDTAFCSWPRLSCDADGSRVLSLDLSGLNLSGPIPAAALSSLSHLQSLNLSNNILNSTFPEGLIASLKNLRVLDFYNNNLTGALPAALPNLTNLVHLHLGGNFFFGSIPRSYGQWSRIKYLALSGNELTGEIPPELGNLTTLRELYLGYFNSFTGGIPPELGRLKELVRLDMANCGISGVVPPEVANLTSLDTLFLQINALSGRLPPEIGAMGALKSLDLSNNLFVGEIPASFASLKNLTLLNLFRNRLAGEIPEFVGDLPNLEVLQLWENNFTGGVPAQLGVAATRLRIVDVSTNRLTGVLPTELCAGKRLETFIALGNSLFGSIPDGLAGCPSLTRLRLGENYLNGTIPAKMFTLQNLTQIELHDNLLSGELRLDAGVVSPSIGELSLYNNRLSGPVPVGIGGLVGLQKLLVAGNRLSGELPREIGKLQQLSKADLSGNLISGEIPPAIAGCRLLTFLDLSGNRLSGRIPPALAGLRILNYLNLSHNALDGEIPPAIAGMQSLTAVDFSDNNLSGEVPATGQFAYFNATSFAGNPGLCGAFLSPCRSHGVATTSTFGSLSSASKLLLVLGLLALSIVFAGAAVLKARSLKRSAEARAWRLTAFQRLDFAVDDVLDCLKEENVIGKGGSGIVYKGAMPGGAVVAVKRLPAMGRSGAAHDDYGFSAEIQTLGRIRHRHIVRLLGFAANRETNLLVYEYMPNGSLGEVLHGKKGGHLQWATRYKIAVEAAKGLCYLHHDCSPPILHRDVKSNNILLDAEFEAHVADFGLAKFLRGNAGGSECMSAIAGSYGYIAPEYAYTLKVDEKSDVYSFGVVLLELIAGRKPVGEFGDGVDIVHWVRMVTGSSKEGVTKIADPRLSTVPLHELTHVFYVAMLCVAEQSVERPTMREVVQILTDLPGTAAATAMDAPSHGSGKEQDRSAEMQQQDGSRESPPQQDLLSI

SEQ ID NO: 204402 - protein, 112 aa, Oryza sativa
  Clone ID: PAT_MRT4530_99493C.1.pep
MYPPPPAGSRHLRAVSHHRHHIYNYNYIYIYIYTYMHVYIHIHTYTYIHIYIYIYINYSTPCYTHTHTHTHTHTHTHIYIYIYIYIHTHTHTHTHTHTHTHTHTHTHTHTHF

SEQ ID NO: 204403 - protein, 239 aa, Oryza sativa
  unsure (1)..(239): unsure at all Xaa locations
  Clone ID: PAT_MRT4530_99494C.1.pep
RRLRVPALLVLPRPAGPPWGCCWRSGTRSVDPSLFPSLRSVGSGVPARANAVFLASFGALLDGSPLQSEVSRAVVEEKRLVFTGHSSXGGSIATLAAIWFLETCTRRGSVNQAHPFCVTFGAPLVGDNTFNNAVRREGWSQCILNFVVPVDIIPRIPLTPLASATEGIQAVLDWLSPQTPNFSPSGMPLIISQFYENLLRSTLSIASYEACSFMGCTSSILGTLTSFIELSPYRPCGTY

SEQ ID NO: 204404 - protein, 192 aa, Oryza sativa
  Clone ID: PAT_MRT4530_99495C.1.pep
MAVQNGGGDGSGSGAASVVVNVYDLTPMNNYLYWFGLGIFHSGIEVHGVEYGFGAHEFPTSGVFEVEPKNCPGFVYRRSVRMGTTGMSRAEFRSFIEKLTGKYNDDVSKNLTGKPIPGWVNRLARVGSFFNYLLPKSIQVSAVRHVPTHPAFSVALRGSRSCSISGDSDVDELDQHLLSATTIELHSIEHQS

SEQ ID NO: 204405 - protein, 198 aa, Oryza sativa
  Clone ID: PAT_MRT4530_99496C.1.pep
MAEKPPPSPSSASPGSVKEKIQQLDQSDVNEGNVMTITPDKLTPDQKEFEAMMQQARNQFLNSFMQTRKGTVVQKYQVRVVADVPGTSSSKDAGLKQALDGLGQPSDKDRVDYAVHNAVINQSGVLVNTLSNMMKAIATGSIAEHQAAGPIYLPRGTFPNYRPLITDIHPPVQAVPPIASSTQPMAPVSISPPAPPAP

SEQ ID NO: 204406 - protein, 207 aa, Oryza sativa
  Clone ID: PAT_MRT4530_99497C.1.pep
MAVQNGGGDGSGSGAASVVVNVYDLTPMNNYLYWFGLGIFHSGIEVHGVEYGFGAHEFPTSGVFEVEPKNCPGFVYRRSVRMGTTGMSRAEFRSFIEKLTGKYNGNSYHLISKNCNHFTDDVSKNLTGKPIPGWVNRLARVGSFFNYLLPKSIQVSAVRHVPTHPAFSDDDMDSRSCSISGDSDVDELDQHLLSATTIELHSIEHQS

SEQ ID NO: 204407 - protein, 1567 aa, Oryza sativa
  unsure (1)..(1567): unsure at all Xaa locations
  Clone ID: PAT_MRT4530_99498C.1.pep
MLQQARDQFLNSFMQTRKGTLVQKYKVKVVADDPGTSSSKGEDGKQAPDGSAQLSDKGATNGSLGSQGDNSQGVHGVQGDGVHGVQGQLVNPRLLMREQPQHSGQVANRLTQDQVAATFLPPQPAVDPIQQQLIQQTLPIQQVVQPIQQQVVQSVQQTPPRQQPPWPIQQTSLRQQIVQPIQHQCSMSASAGFVTPGGQPVQQFLNQVVPEHLVRHSQGAAQQRPWADVIADVTREQFGLKPKEIESLYRQPYPEWFERVPLPNQFKVPDFSKFLRQDGVSTYEHISRFLAQCGEVSAVDALRVSLFRLSLSGSAFTWFSSLSYGSINSWANLEKQFHSYFYSGVHEMKLSDLTVIKQRHDEPVHEYIQRFREMRNKCFSLSLTDAQLVDLAFQGMIAPIREKFSSEDFDSLSHLIQKLTLHEHRSAEARKSSKKVNHVCPYMYGSDDDEDDSEIAAAEWVRSKKVIPCQWVKSSGKEEKYDFDITKADKIFDLLLREKQIQLPAGHTIPSVEELGKKRYCKWHNSGSHSTNDCKVFRQQIQVAIEGGKIKFDDSKKPMRVDGNPFPVNMVHTADQTADTGRMRGYQVSSARIINKYQRKYEKQQERHHEEDNGDFDPHWGCEFFRFCWNEGMRLPSIEDCPGCSDVAGGSSRLYDGGNRPKQTRVPVHQRLGLVNQRGDSEDDENRKTQWCPSSIFTKNQKRRVQRLRSRERFQEVEQEINHRLKKAKPRQEWRVKNQAPIADDIAADEAKRLAKGKSVVTAPVNMAVFEKPEGTENRHLKLLYINGYVNGKPMSKMMVDGGAAWQGDKIEIVSADSQLKMENPSYYFEGVVEGSNVYTKDTVDDIDDKQGQGFMSADDLEEIDISPSNRPRPTFISKNLSLEFRTKLIELLKEFRDCFAWEYYEMPGLSRLIVEHRLPIKPGVRPHQQPPRRCKADMLEPVKAENKRLYDAGFIRPCRYAEWVSSIVPVIKKNSKVRVCIDFRDLNKATPKDEYPMPVADQLVDAASGNKILSFMDGNAGYNQIFMAEEDIHKTAFRCPGAIGLFEWVVMTFGLKSAGATYQRAMNYIYHDLIGWLVEVYIDDVVVKSKEIKDHIADLRKVFERTRKYGLKMNPTKYAFGVSAGQFLGFLVHERGIEITQRSINAIKKIKPPENKTELLRHYLLSNECTIICKADVVRYMLSAPILKGRVGKRIFSLTEFDLRYESPKVIKGQAIADFIVEHHDDSIGSVEMVPWTLFFDGSVYTHGCGIGLVIISPRGTCFEVAYAIKPYATNNQAEYEAVLKGLQLLKEVEADAIEIMGDSLLVISQLAGEYECKNDTLMVYNEKCQELMKEFRLVTLKHVSREQNIEANDLAQGASGYKPMIKDVKVEIAAITADDSRKLRYKVLKYTLLDDELYYRTIDGSIFVSDEFVQFADSVGIKLLNSSPYYAQANGQVEASNKSLIKLIKRKISDYPWQWHTRLAEALLSYRMACHGSIQVPPYKLVYGHEAVLPWEVRISSRRIELQDGLTADEYYNLMADEREDLVQSCLRVLAKVTKDKERVARHYNKKVVPXIFWKVNLYGS

SEQ ID NO: 204408 - protein, 122 aa, Oryza sativa
  Clone ID: PAT_MRT4530_99499C.1.pep
PGSTQGSARVFSTPGEWVQPGPGLGPQEPPPGVPGVLVGGVGRRQPPGGAGPVLPPAKEGGGALPFQRVAPHGEGARQEEEGPPGVQKGAHAPHPQGAPRAQKVGPQHGPQRGGIAPFPLGD

SEQ ID NO: 204409 - protein, 86 aa, Oryza sativa
  unsure (1)..(86): unsure at all Xaa locations
  Clone ID: PAT_MRT4530_9949C.1.pep
EEVKKVENEXXRDIEMVKXDKEKXXSXDELVXXDDEVRVEXEXXRDIXVVXXNEEVISVKKEXXMDVXXXKLXEEGVSVKKKGFSL

SEQ ID NO: 204410 - protein, 129 aa, Oryza sativa
  unsure (1)..(129): unsure at all Xaa locations
  Clone ID: PAT_MRT4530_994C.1.pep
LSLLCAGWPAGRGGRGGRRRPVTGNATAVTVATLESDEGINMYTRGHCNLSXRSILLSAHRHPLFXRFYLTTGGIWHLTRGCIGSVXSPAKGXVLRSIGPESIGYIGVVQGCIASISWIALVCLIYLPT

SEQ ID NO: 204411 - protein, 281 aa, Oryza sativa
  Clone ID: PAT_MRT4530_99500C.1.pep
MGSERLSSTRGQIPSRGHIVGGGDGSEGDSQIWHIPVGVGQGRTPSGSGNDEVAWWSFSDLCGHSVASTVPSVYTWHLVGSVEDTMVEGDFEVKAFLGLSMLARATPSGTVYLLEDFAIGSLIQLHIKGAPCPFSRKATKRSARPLHGLCNTPEEDIILKNIFSPERAMASGNLRGLQRVMLREKSLVLYSEINDTQSPPLVFWSTHLYQREKSTILDRFFPSGRPTYVKGNDPMEQPKVAANSCDFSSEIFRGIIQDFAKFTLRPEETAKEFNRAFKANN

SEQ ID NO: 204412 - protein, 1697 aa, Oryza sativa
  unsure (1)..(1697): unsure at all Xaa locations
  Clone ID: PAT_MRT4530_99501C.1.pep
MGSTLVAAYDGIDRPAGHGGLAGAGRSHHGDDMDDSVDTSGQKLADAVTARSNLNTYTNQMAMILALVEALGRASNLEQSNKSDFVFQPHEIVNGHRHEVMQVFLMDEKPPASPSSASPGSVKEKIQRLGLSEVNEGNIVTITPDKLTPDQKKDFEAMMQQARNQFLSSFMQTRKGTVVQKYKVKVVADVPGTGSSMDGEVKQAPDGSAQPSNKGAADGDQGNQGDGSQGVQGVGSQGFNNFQDQVDYAVHQALINQSGILVNTLSNMVKTMVDGSMAEYQATGLVYLPGGVFLNYQPLITDNQPIGQLIPLNAPSVQPTAPVSAPAPAAPPLAPGQLVNPRLQVREQPQHSGHNVNRLTQDQVASMFLLPQHTTDPTQXSRFSKRHQGSRLCSRFNKHPQSNRLCNQFSIRHQDGSTSATTXWADMIANVMKEQFGLRPKDSGNLYRRPYPEWFERVPLPNRFKVPDFSKFSGQDSVSTYEHISRFLAQCGEASAEDALRVRLFRLSLSGSAFTWFSSLLYGSINSWADLEKQFHSYFYSGVHEMKLSDLTAIKQRHDEPVHEYIQRFREMRNKCYSLSLTDAQLADLAFQGMIAPIREKFSSEDFDSLSHLTQKVTLHEQRFAEARKNSRKVNHVCPYIYGSDDEDEDDSEIVATEWVRSKKVIPCQWVKSSGKEERQQIQAAIEGGKIKFDDSKRPMKVDGNPFPVNMVHTAGRTADGGRARGFQVNSAKIINKYQKKYDRQHEKHYEEDDDGFDPHWGCEFFRFCWNEGMRLPSMEDCPGCGNVAESSSRSYNRGNRLKQTRVPVYQRLGPVNQDCSQEDNENRKTQWCPSGIFTKNQKRRKTKPKQEWRIKNQVPTADEAIADEAKRLAKGKRVVTASINMVFTLPTEFGVNLIPYATFRKLGRNTEDLIKTNMVLKDFGGNPSETNGVLNVELTVGNKIIPTTFFVIDGKGSYSLLLGRDWIHANCCISSTMHQCLIQWQGNKIEIVPADRTKLIELLKEFRDCFAWEYYEMSGFIRSIVEHRLPIKPGVRPHQQPPRRCKADMLEPIKAEIKRLYDADFIRPCRYAEWVSNIVPVIKKNGKVRVCIDFRNLNKATSKDEYPMPVADQLVDAASGHKILSFMDGNAGYNQIFMTEEDIHKTTFRCPGVIGLFEWVVMTFGLKSAGATYQRAMNYIYHDLIGWLVEVYIDDVVVKSKEIEDHIADLRNVFERTRKYGLKVNPTKCAFGVSAGQFLGFLLHERGIEVTQRSVNAIKKIQPPENKTELQEMIGKINFVRRFISNLSGRLRHYLLSNECTIICKADVVKYMLSAPILKGRVGKWIFSLTEFDLRYESPKAVKGQAIADFIVEHRDDSIGSVEIVPWTLFFNGSVCTHDCDIGLVIISPRGACFEFAYTIKPYATNNQAEYEAVLKGLQLLKEVEADAIEIMGDSLLVINQLAGEYECKNDTLIVYNEKCQELMKEFWRVTLKHVSREQNIEANDLAQGASGYKPMIKDFKVEVATITVEDWRYDVHQYLQNPSQSASRKLRYKALKYTLLDDELYYRTIDGVLLKCLSADQAKVAIGEVHEGIYGWGIDMIGMINPPSSKGHRFILVATDYFTKWVETIPLKKVDSGDAIQFVQEHIIYRFGIPQTITTDQGSIFVFDEFVQFADIMGIKLLNSSLYYAQANGQTDASNKSLIKLIKRKISDYPR

SEQ ID NO: 204413 - protein, 163 aa, Oryza sativa
  Clone ID: PAT_MRT4530_99502C.1.pep
MPHHHHRRHGHAAAAAEAEEEAPSPRPSSAGCYTFLRSASRRGGAGGGGGYRRLDSSSAAGDVIRVEVGTTKGERSVFHVDQAVLEAGPVRRLLAAAGRRTRGGAVAVAVDVLLFEHLLWLQAAGDKGMLGYDDDESAAADLSEIVDFYSQDDDVDDSGHRGF

SEQ ID NO: 204414 - protein, 246 aa, Oryza sativa
  unsure (1)..(246): unsure at all Xaa locations
  Clone ID: PAT_MRT4530_99503C.1.pep
MEKQLRGVRQGDPLSPLLFALGADLLQSVINKAHQRGVLSLPILVSNDDNFHVIQYADDTFFFLXSSTQLFALKALLNSFAVSSGLRVNFAKSCMIPLNISEEKSQLLAATFGCSIGSLPFTYVGLPLGKKRSRMVDFSPSTDRIERRLTAXTLVKVCRPKDKGGGLGVIDLRVQNKALLPKHLHKFYNKLDIPWVNFAWSSYYSLEAPQVARSHGSFWXKDVFQYDVLFRGIAKPMQRTSTSFSS

SEQ ID NO: 204415 - protein, 1645 aa, Oryza sativa
  Clone ID: PAT_MRT4530_99504C.1.pep
MAEKPPPQPSPASPGSVKEKMQKLGLTDVNEGNVVPIDPEEFTPEQKKEFEAMLQQARDQFLNSFMQTRKGTLVQKYKIKVVADDPGTSSSKNGDRKQAPDGSAQPSDKGATDGSLGNQGDNSQGVHEVQGNGVHGVQGDGAQGLQGGNLNQNSEAAQDFFNNFQDRVDYAVHHALINQEQFGLKPKETGSLYRQPYPDWFERIPLPNRFKVLDFSKFSEQDGVSTYEHISRFLAQCGEASVVDALKVRLFRLSLSGSAFTWFSSLLYGSFNSWADLEKQFHSYFYSGVHEMKLSDLTAIKQRHDEPVHEYIQRFREMRNKCFSLSLTDAQLADLAFQGMIAPIREKFSSEDFDSLSHLIHKVTLDEHRSAEVRKNYKKVNHVCPYMYGSDDDEDDSEIAAAEWVRSKKVIPCQWVKSSGKEEKYDFVLKLTRSLICYSERSKFNFLLVFRQQIQVVIEGGKIRFDDFKKPMKVDAGQTADRVRAKGFQVNLAKIINKYQMKYDKQQEKHHEEYDYGFDPHWGCEFFRFCWNEGMRLPSIENCPGCSDIIESSSRSYNRGNRLRQTRVSVHQRLGPVNQDHGHQDNVIRKNQWCPSGIFTKNQKRRVQRLRNKERLQEVEQEINHRLKKEKPRQEWRVKNQVPVADDVAADEAKRLAKGKSVVTAPVNMVFTLPAEFGIDQADVDEVEEESAKLVLSPEQAVFEKPKGTENRHLKPLYINGYVNGKLMSKMMVDVGAAVNLMPFAMFRKLGRNAEGLIKTNMVLKDFGGNPSETKGILNVELTVGSKTIPTTFFVTDGKGSYSLLLRRDWIHANCCIPSTMHQCLIQWQGDKIEIVPADRVHVYTKDTVDDLDDKQGQGFMLADDLEEIDIGPGDRPRPTFISKNLTPEFRTKLIELLKEFRDSFAWEYYKMPGLSQSIVEHRLPIKPGVKPHQQPPRRCKADMLQPVKAEIKRLYDAGFIRPCRYAEWVSSIVPVIKKNGKLRACIDFRDLNKATPKDEYPMLVANQLVDAASGNKILSFMAEEDIHKTTFRCPGAIGLFEWVVMTFGLKSARATYKRAMNYIYHDLIGWLVEVYIDDVVVKSKEIKDHIADLRKVFERTRKYGLKMNLTKGACFEFAYTIKPYATNNQVECEAVLKGLQLLKEVESDAIQIMGDSLLVINQLAGEYECKNDTLMVYNEKCQELMKEFRLVTLKHVSREQNIEANDLAQGASGYKPMIKDVKVEVAAMTADDWRYDVHQYLYSPSQSASRKLRYKALKYTLLDDELYYRTIDRVLLKCLSVDQAKVAIGEVHEGICGTHQSAHKMKWLLRRAGYFWPTMLEDCFRYYKGGQDCQKFGAIQRAPASAMNPIIKPWPFRGWGIDMIGMINPPSSKGHKFILVATDYFTKWVEAIPLKKVDSGDAIQFVQEHIIYRFGIPLTTDQGLMFVSDEFVQFADSMGIKLLNSSPYYAQANGQAEASNKSLIKLIKRKISDYPWQWHTRLAEALWSYRMACHGSIQVPPYKLVYGHEAVLPWEVRIGSQRMELQNDLTADEYYNLMADEREDLVQSRLRVLAKVTKDKECVTRHYNKKVVPKDFSEGELVWKLILPIGTRDCKFGKWSPNWKGPFQIYKVVSKGAYMLQGLDGEVYGRALNGKYLKKYYPSV

SEQ ID NO: 204416 - protein, 2013 aa, Oryza sativa
  unsure (1)..(2013): unsure at all Xaa locations
  Clone ID: PAT_MRT4530_99505C.1.pep
LQDRINWHASIPEGEFWTCTRVKQISQASCFPSTRFWHARWNRLEVXKFSLMDDKPPASPSSSSPDFVKEKIQQLGLSEVNESNIVTITPDKLTSDQTKDFEAMMQQARNQFLSSFMQTRKGTVVQKYKVKVVADVPGISSSKDGEVKXAPDGSGQPSDKGASDGSQGNQGDNSQGVQGVQGDGTQGVQDQVDYAVHHALINQSGILTNTLANMVKSMVDGSMAGYQATGPVFLPEGVFPNYRPLITHNQPVAXSIPLNAPSAQPMAPVSAPALAAAPSAPGQLVNPRLLVREQPQHSGQNVNRLMQDQVASMFLPPXHTVNPTQXSRFNKHPRLNECIGWVCDTWWSACAACCKSSCPGALGSSRTTRWHDVIKEQFGLRPKDARNLYXQPYPEWFERVLQPNRFKVLDFSKFSGQDSTSTYEHISRFLAQCGKASAVDALRAWLFRLSLSGSAFTWLSSLPYGSINSWADLDKHFHSYFYSGVHEMKLSDLIAIKQRHDEPVYEYIQRFREMRNKCYNLSLTDAQLADLAFXGMIALIREKFSYEDFESLSHLTQKVTLHEQRFAEARKNSRKVNHVCPYIYGSDDEDDDSEIAAAEWVRSKKVIPSQWVKNSGKEERYDFDITKADKSFDLLLREKQIQLAAGHTIPSAEELGKKRYCKWHNSRSHTTNDCKVFRQQIQAAIEGSKIKFDDSMRPMKVDGNPFPVNMVHTAGRTADGGRARGFQVNSAKIINKYQRKYDKQQEKHYEEYDDGLRLSSIEDCPGCSDIAESSSRSYSRGNRLRHTRVPXVHQRLGPVNKDRGQEDYENRKTQWCPSGIFTKNQNRRVNQVPVADEATADEARRLDKGKSVVTASVNMVFTLPAEFGIKQADVDEVEEESAKLILSPEHAVFEKPEGTENRHLKPLYINGYVNGKPMSKMMVDGGAAVNLMPYTTFRKLGRNAEDLIKTNMVLKDFGSNPSETKEVLNVELTVGNKTIPTTFSVIDGKGSYSLLLGRDWIHANCCIPSTMHQCLIQWQGDKIKIVPDDSQLKMESPSYYFEGVMEGSNVYTEDTIDDLDEKXGQGFVLADDLEEIDIGPSDRPRPTFISKNLSSEFRAKLIELLKEFRXCFAWEYYEIPRLSRSIVEHRLPIKPGVRPHQQPPRRCKADMLQPVKAEIKRLYDAGFIRPCRYAEWVSSIVPVIKRNDLNKATPKVEYPMPVADQLVDAASGHKILSFMDGNAGYIQIFMAEKDIHKTAFRSPGAIGLFEWVVMTFGLKSAGATYQRAMNIYHDLIGWLVEVYIDDVVVMSKEIEDHIADLRKVFERTRKYGLKMDPTICAFGVSAGQFLGFLVHERGIEITQRSVNAIKNIQPPENKTELQEMIGKINFVRRFISNLSGRLEPFTPLLXLKADQQFTWGAEQQKALDNIKEYLSSPPVLIPPQKGIPFRLYLSAGDKSIGSVLIQELEGKERVVFYLSRLLLDSXTRYSPVEKLCLCLYFSCTRLRHYLLSNECTVICKANVVKYMLLAPILKGRVGKWIFFLTEFDLRYESPKAIKGQAIANFIVEHRDDLVGSVEIMPWTLFFDGSVCTHGCGIGLVIISPRGACFEFSYTIKPYATNNQAEYEAVLKGLQLLKEVEADTIEIMGDSLLVISQLAREYECKNDTLMVYNKKCQELMKEFQLVTLKHVSREQNIEANDLAQGASGYKPMIKDIKVEIAAITADDWRYDVHQYLQNPSQSASRKLRYKALKYTLLDDELXGVLLRCLSANQAKVAIGDVHEGICGTHQLTHKMKWLLRRAGYFWPTMLEDFFRYYKGCQDCQKFGAIQXAPTSAMNPIVKPRPFRGWGIDMIGMINPPSSKGHKLILVATDYFTKWVEAIPLKKVDSGDAIQFVQEHIKYRFGIPRTIITDQGSIFVSDXFVQFAESMGIKLLNSSPYYAQANGQAKASNKSLIKLIKRKISDYPRQWHARLPEALWSYRMAYHGSIQVPPYKLVYGHEVVLPWEVRIGSRRTKALNGKYFXKYYPSVSVNA

SEQ ID NO: 204417 - protein, 585 aa, Oryza sativa
  Clone ID: PAT_MRT4530_99506C.1.pep
MSKMMVDGEAAVNLMPYATFRKLGRNAEDFIKTNMMLKDFGGNPSETKGVLNVELTVDSKTIPTTFFVIDGKGSYSLLLGRDWIHANCCIPSTMHQCLIQWQGDKIEIMPADSQSKMENPSYYFEGVVEGSNVYTKDTVDDLDDKQGQGFMSADDLVEIDIGPGDRPRPTFISKNLSPEFRTKLIELLKGFRDCFAWEYYEMPGVSQSIVENRLPIILGVRPHQQPPRRYKADMLEPVKAEIKRLYDAGCIRPCRYTEWVSSIVPVIKKNDKVRVCIVFRNLNKATPKDEYPMPVADQLVDAASGHKILSFMDGNAGYNQIFMAEEDIHKTAFRCPGAIGLFEWVVMTFGLKSAGATYQRAMNYIHRNLIGWLVEVYIDDVIVKSKEIEDHIADLRKVFERTRKYGLKMNLTKCAFGVSAGQFLGFLVLERGIEFAYTIKPYATNNQAEYEAVLKGLQLLREVEADTIEIMGDSLLVISQLAGEYECKNDTLMVYNEKCQELMKEFRLVTLKHVYREQNIDANDLAQGASGYKPMIKDVKVEIAAMIADDWRYDVHRYLSNPSQSASRKLRVFLTDNAGGLFQIL

SEQ ID NO: 204418 - protein, 75 aa, Oryza sativa
  Clone ID: PAT_MRT4530_99507C.1.pep
HESDLDQSEHDTWMPQPIAVVSVLGELRPSVGSIRRRRSSHGVKWWDWLGGVAPRSRLVGTRLLGVASPAADMWT

SEQ ID NO: 204419 - protein, 286 aa, Oryza sativa
  Clone ID: PAT_MRT4530_99508C.1.pep
MPLDELPPLRLRDMMFSATTTHGTMATCLERLLDSARCSSGVILNTFDDLENSDLRKIANGLSVPVYAIGPLHKISIGQESSLLTQDQSCLEWLDKQEAESVLYVSFGSLASMDSQELLETAWGLVDSEIPFLWVIRPNSVQGSEQTCLPDGFEEATRGRGMVVSWAPQQDVLKHRAVGGFWTHNGWNSTLESICDGVPMICRPQFADQMINARYVQEVWKIGFELEGKLERRMIERAVRRLLCSEEGKEMRHRAKDLKNKATTCIEKGGSSNTAIDMLVNLIMSF

SEQ ID NO: 204420 - protein, 295 aa, Oryza sativa
  unsure (1)..(295): unsure at all Xaa locations
  Clone ID: PAT_MRT4530_99509C.1.pep
MKYNATSCSQGNTQGMCGAHQAARTVASKMFRQGIYWPTVFKPIXIWPFARXGLDIIGIFPVGRNGYKFTIVAIEYFSRWIEAEPLGTITAAAVQKFIWKNIICRFGVPKEFITDNGKQFDFEKLKEMCEGLNLQIKLASVTHPQSNGAAERANGKILEALKKRLEGAAKDEAMTPAELGANSPRVMFSGGEDGREVSLELLEGVRVEALEHMRKYAKSTSATYNRKVRPTELRPDHLVLRKKANPVAVGKLESKWEGPYLIKHKSRTGSFWLATLEGEEFEHSWNAASLRWFYV

SEQ ID NO: 204421 - protein, 485 aa, Oryza sativa
  Clone ID: PAT_MRT4530_9950C.1.pep
MGERRRRASAVAGGRAEDEKAASAPAAAAPAPTVWFALKRSLHCRSEPSEVHVPRPKAVAAAAAGGGGHLSAIVTKRAAPRSGCSRSIANLRDVIHGSKRHPERPPSCSPRSIGSSEFLNPIAHEVVLSTNSRCELKITGFGGCGGLAAAAAAGGGVLASPHEADGDGAVVSSFVGTLRPGTPGPGWSHGLQYSGSCRGSMRCTPPRSPNVLLDSRDAAAAGVTAHRASCEDAVKSFGKGGGLSCHRCGEQFSKWEALEAHHLSKHAVTELVEGDSSRKIVEIICRTSLLKSESSCVRIERVFKVHNTQRTLARFEEYREAVKLKASKLPKKHPRCLADGNELLRFHGATLSCALGGAAGSSSLCASDKCAVCRIIRHGFSAKKEGKAGVGVFTTSTSGRAYESIEASAGAVVGGDDPAATRKALLVCRVIAGRVHKPLENLKEFAGQTGFDSLAGKVGPYSNIEELYLLNPRALLPCFVVICKA

SEQ ID NO: 204422 - protein, 44 aa, Oryza sativa
  Clone ID: PAT_MRT4530_99510C.1.pep
SARLNEEFIMQLSLMELRCLGHLKIALYFVTSVDSLSTYIKAAE

SEQ ID NO: 204423 - protein, 116 aa, Oryza sativa
  Clone ID: PAT_MRT4530_99511C.1.pep
APPETKRKGERGMEKGLYKLYQNYREPIGPWVKLGGGGGYLEKITWYRGPKGSFLGGARKKTSYGYIRKKTPWGAPRGIPRPIKSKSGSPASFFIFNQPPKSTSIPGSPRFEKAGI

SEQ ID NO: 204424 - protein, 731 aa, Oryza sativa
  Clone ID: PAT_MRT4530_99512C.1.pep
MDTASFVTSLLTSFVIFVVLVLVFTWLSSRPGNAPVYYPSVLLRGLDPWEGRGRGTRSPVGWLRQAISASEGDVVAAGGVDAAVYLVFLSSVLSILVFSGIVLLPVLLPVAATDDNLNLERAIGLKNGKTPQNFTELEKLALGNVQEHSRRLWAFLLSVYWVSFVTYFVLWKSYKHVSNMRAAARSTPDVKPEEFAVLVRDVPKPPPDQTIKDSVDSYFRALHPDTFYRSMVVTDHTKADKIYQEIEGHKQKIARAEVVYAESKTTGKPEGTKPTHRIGFLGLIGKKVDTIEYCNDQIKELLPKLEAEQKTTLREKQQQAAIVFFNRRSAAASASQTLHAQMFDKWTVEQAPEPRQIIWSNLSKKIYERQIRQVVVYTIVFLTVVFYMIPITAISALTTLEKLREKLPFLKVVVDQPKIKTVLQAYLPQLALIVFLALLPSLLMFLSKLEGIPSQGHTVRAAAGKYFYFIVFNVFLGVTISSTLFSALTTIINNPPGIVNMLASSLPGSATFFLTFVALKFFVGYGLELSRLVPLIIFHLKRKYLCKTEDEVRAAWAPGDLGYNTRVPNDMLIVTIVLCYSVIAPLIIPFGVAYFALGWIIVKNQVLRVYVPSYESNGRMWPHMHTRIIAALLIYQITMVGVILLKKFLYSPVLVPLIPISFIFAYICHMRFYPAFAKTPLEVVQHNVKDTPNMDAVYTSYIPACLKPEKLEDVDIFEDAQLHTTSRAPSI

SEQ ID NO: 204425 - protein, 644 aa, Oryza sativa
  Clone ID: PAT_MRT4530_99513C.1.pep
MADATHAAADGGVATILASADGRDFLLRNSADKVKISSIKASTVALYFSASWCPPCRRFTPKLIEAYNELVSQGKSFEVVFVSGDSDQDAFNAYFAKMPWLAVPFSDSEALAKLNERYKVMGIPHLVILDAKSGEIYTEDGVELVHEYGTEAYPFTTERINELKEQEKAAKDNQTIHSLFGTPTRDYLITNKGDKVPISDLEGKYVGLCFVVNGYGPVVQFTSVLAKIYEKLKAVGEKFEVVMVSLDGDEESFNESFADMPWLAIPQGDKMCEKLARYFELSGLPMLVLIGPDGKTLNDDIADIIDEHGPDAWEGFPFSAEKLEILAEKAKAKAESQTLESLLVTGDLDFVLGKDGAKVPVSELVGKTVLLYFSAKWCPPCRAFLPKLVNEYNKIKEKHNDFEIVFISSDREQSSYDEFFSGMPWLALPLGDERKQQLSKIFKITGIPSLVAIGPDGKTVTKDAKTPLVAHGADAFPFTEEKLQELEKEKEKKINDMAKGWPEKLKHDLHDHELVLTRCTTYGCDGCDEMGDSWSYRCKECDFDLHPKCALEEKGDVEMGEENAEAAPAWVMCAMSMMLVLTRCTTYGCDGCDEMGSSWSYRCRECDFDLHPKCALGKEEEKKGDDEAEAEADPACEGGVCRKA

SEQ ID NO: 204426 - protein, 177 aa, Oryza sativa
  Clone ID: PAT_MRT4530_99514C.1.pep
MLSIHGRRHRHRREKRGGGGGNRPPPSDPPAATTNATTANGGRREGAEGAAAARSTGALGGGGEDGEAAQLRSPSSRRIWQWEGTSGRSSLLPPLPRRGGRGHCCRCHLLPPLGRTISTCRRHPLPAASPLAAPTAASATRERRAREKTERRRALRGGRRQPSGGRRARGRGSGALD

SEQ ID NO: 204427 - protein, 200 aa, Oryza sativa
  unsure (1)..(200): unsure at all Xaa locations
  Clone ID: PAT_MRT4530_99515C.1.pep
QPPPLCLSPSHCRSTSPPAAAAAPPLPQPPPPPPPLGDRVPAAARLCLSPASARRRRSPPLPRQRPPPTGNRAPTAAGLCLSPNTRRRQEIERPPPLISASPPAIQRPXCHRRSPPAPDAAGEXTELVSSKCRRSCVEFIPSTVELLPVVAGELELFSSAVKILPSSPCLPATSLAPSLRALNALSNACDKTRPTMGLGW

SEQ ID NO: 204428 - protein, 1142 aa, Oryza sativa
  unsure (1)..(1142): unsure at all Xaa locations
  Clone ID: PAT_MRT4530_99516C.1.pep
RTPVQQGFRFEAAWLRAGDYREVVESAWARGSDGSQSLQGTWRNMQQMAASLRDWSKVSFGSIRKEIQRLERKLKTLRSSGLEESVIQEERMVERQLCELFEREEIMARQRSRVDWLREGDRNTAFFHARATARRRTNKITVLVKDDGTRCTDQEGIKKLAGKFYEDLFTSEPCVSTDVVLEAIPIKVDVLVNEELGKPYSDDEIKDALFQMGPTKAPGPDGRKVLXRISSHXTHWGLIKGEICNAVRGFLLGEEIPEGFCDSVIVLIPKVHNPEHLSKFRPISLCNVLYKIASKVLANRLKLFLPDIVSEFQSAFVPGRLITDSSLVAYECLNTIKKQSNKKPFFALKIDMMKAYDRIEWSYLHGCLMRLGFEQDWINTVMRCVTSTRYAIRINGELTDTVVPSRGIRQGDPISPYLFLLCTEGLSCMLQKKEQQGFLHGIRNGRQGPPISHLLFADDSIFFPRSDHRSVQAIKSTLQAYCDASGQKINMQKSSIFFGKRCPSNIRNEVKAKLQVSTEILQDSYLGMPTEISRAVSNSFQFLPGRIWKRVNGWTDMPLSRAGKETMLKSVAQAIPDFVMSCFRIPIMTCEKMKSYIADHWWGFEEGKKKMHWRFWEWLTSPKSLGGMGFRDFVIFNQAMLSKQGWRLLTDPNSLCTRVLKGRYFPNCSFWDAPQPRSASFTWRSILFGKELLKKGVAWRVGDGKSIKILSDNWIPNVQAGLVSPLMHIPEDATVQFLMEEGGKEWNHDLVKYAFDEETANEILQVPISRHGGDDFASWPHDKRGLFTVRSAYNLARSEAFLIDHNSSGXRGLPSIMHDNETNWKNLWKICAPGKMKINLWRAAHDCLPTGFQLRRRHIEARDGCAFCSRDDRIEHVFLMCPFSDSVWKEIKQVYNIKLGRGDLANVRXWIFDFLRRGSAIQNTVLAVTFWHIWEARNNAKNNVETLHPRRVVQKIVAYVEMIMQHCGPGNVSRPAERISLPSWVPPPAGVFLINTDAAVFQAERQMGVGVVIRDQHGNCLLAANTRFMGITDPETAEACAIRHALWLAKEEGFHNVIVASDCLSVIQKLNSPGRDRSKIGCLVEDIKKLGVEFISVSFIHVSRCSNVAAHTLARCSEPSVCNVYRNETPDCIREMLLSDAQ

SEQ ID NO: 204429 - protein, 396 aa, Oryza sativa
  unsure (1)..(396): unsure at all Xaa locations
  Clone ID: PAT_MRT4530_99517C.1.pep
MPELPEVEVARRALEEHCVGKRIVRCSAADDTKVIDGVAPPRLEAALVGRTISAARRKGKNLWLALDSPPFPSFQFGMAGAIYIKGVELSKYKRXDDGLEFSFTDKRRFAKIRFLDNPEAVPPISELGPDALFEPLHLDDFVESLSRKKAPIKALLLDQSFISGIGNWIADEVLYQARIHPMQTASMISKEKCKALHQCIIEVIEKSLEVGCNSSQYPENWIFHSREKKPGKAFVEGKKIDFITVGGRTSAYVPELQKLDGIDATASRAKISKEQSKSNKAAREVDDDEEEAKPAKRGRKQLVKATHEIQEDEEDTKESKRGRKQPAKTSKGSWKKAHHSSEGSGDDDSDDEAVDKVVAEQGKRRDPKQPAEAKSSSDKGGSAAPAKRPQRKKRQL

SEQ ID NO: 204430 - protein, 230 aa, Oryza sativa
  unsure (1)..(230): unsure at all Xaa locations
  Clone ID: PAT_MRT4530_99518C.1.pep
RTDRAARQKGRAPPDAGGXHRGRRGPPPSXPXXDTTARAATPGGARETPNRPRQPGRGGXRNAPAXRATAPKRPGPRKPGPXPPGXRPARAAPPKGPAAPPAPGRGRRARRXGPRAPRGGPPRXPXTPPTRPRSEGGPGRPAPEARKKGTGRDPGPRQHTRPPXARPRREGGGGPPGRETGHRAPPGAAXXRGGGRQPGRAPPSHLSIAPPRRQGDGAREAGAVQKGPFL

SEQ ID NO: 204431 - protein, 175 aa, Oryza sativa
  Clone ID: PAT_MRT4530_99519C.1.pep
MPELPEVEVARRALEEHCVGKRIVRCSAADDTKVIDGVAPPRLEAALVGRTISAARRKGKNLWLAPDSPPFPSFQFGMAGAIYIKGVELSKYKRSAVSPTEEWPLKYSKLLVVMDDGLEFSFTDKRRFAKIRFLDNSFISRIGSWIARATLYQVIEKSLEGACNSTHIPEDWIFR

SEQ ID NO: 204432 - protein, 499 aa, Oryza sativa
  unsure (1)..(499): unsure at all Xaa locations
  Clone ID: PAT_MRT4530_9951C.1.pep
SPAPATACCGDPHVAQKQEKGNLGSLGGVVTEEXERWRTEEMEXREAQIGGLIRMITEKKDAIFDALHADHGKHREDSFRYXLGVLAKSVKNTMKNLKKWEXTEKVEVPLISFPCNARVVPEPIGVVLIFSCWNLPIGLALEPLSGAIAAGNAVVLKPSEFAPSTAAFLAANIPKYLDAKAVKVVQGGAELGEELMSTDGQVLFTGNARVGRIIMTKAAKHLTPVALELGSKCPCIVDCLDSKRECQVAVNRIIGAKWSTCAGQACVAIDYILVEEQFAPFLIELLKSTLKRFFTEPEYMARILNEKHFHRLTNLIEDDQVKSSIVHGGNADPKTLWIEPTIVLNPPLDSDIMMEEIFGPLLPIITVKKTEDCIAFLKSKPKPLAIYAFTNNEKLKQRIVAETSSGSVLFNDAIVQYGLDSVPFGGIGESGFGQYHGKYTFELFSHRKAVVRRSLLVEFMFRYPPWDEYKMGMLRRVFRFDYVSLVLALLAFWLLGIRR

SEQ ID NO: 204433 - protein, 71 aa, Oryza sativa
  Clone ID: PAT_MRT4530_99520C.1.pep
GIDAPSPVTPSRISPPSPWCSASGVGGNHPVWWSGRCAWSSRPFVRPGFVERMSTCVWFNAPSSPYILLVL

SEQ ID NO: 204434 - protein, 75 aa, Oryza sativa
  Clone ID: PAT_MRT4530_99521C.1.pep
HLCRAAPVTRARLLGGASIVVSSISPGCILAWWRVAPPPDDGGRSAFLQRQRGLDNAEVTLLPPSAARGSVVWSP

SEQ ID NO: 204435 - protein, 1376 aa, Oryza sativa
  unsure (1)..(1376): unsure at all Xaa locations
  Clone ID: PAT_MRT4530_99522C.1.pep
MDISRTNEGYTSCGPVVEMSWHRAGVLLLGAQSCLPVPGVPVVGGVGSVLLSMTRMGWKLCHVFRPYTVVQQPIQQTPPIQQVVQPIQQQVMQPVQQTPPRQQPLQPIQQTPLRQQIVQPVQHQGSIGASAGFATPGGQPVQQFLNQVVPEHLVHHVQPDGTVIPQVVPEHLVRNIQPNLHNYQGGNLNYQYQPPSPQAQYQLGGLAQPQFAPQYGQFEPMQQQSQGVAQQRPWADVIADVMREQFGLKPKETGSLYRQPYPEWFERVPLPNRFKVPDFSKFSRQDGVSTYEYISRFLAQCGEASAVDALKVRQQIQVAIEGGKIRFDDSRKPMKVDGNPFPGPCKGFSGXIRLRLSTNIRRSMTSSRRSIMRNTMIADKSLCSSKIGSSKSRSWPKGQCNQEESMNQKRRKAKPRQEWRVKNQVPAADDVAADEAKWLAKGKSVVTAPVNMVFTLPAEFGIDQADVDEVEEESAKLVLSPEQAVFEKPEGTENRHFKPLYINGYVNGKPMSKMMVDRGAAVNLTPYATFRKLGRNAEDLIKTNMVLKDFGGNPSETKCVLNVELTVGSKTIPTTQLKMENPSYYFEGVVEGSSVYTTDTVDDLDDKQGQGFMSANDLEEVDIGPKFRTKLIELLKEFRDCFAWEPTCLNRSRLRLKDYMMLVLFVLADMLXWVSSIVPVIKKNSKVRVCIDFRNLNKARKYGLRMNPTKCAFGVSAGQFLGFLVHERGIEVTQRSVNAIKKIQPPENKTELQEMIRKINFVRKFISNLSGRIEPFTPLLRLKAGQQFTWGAEQQKALDNIKKYLSSPPVLIPPQKGIPSRLYLSAGEKSIGSVLIQELEGKERVVFYLSRRLLDAETRYSPVEKLCLCLYFSSTRLRHYLLSNECTVVCKADVVKYMLSAPILKGRVGNWIFSLTEFDLRYESPKAIKGQAIADFIVEHHDDSIGSVEIVPWTLFFDGSVSEYEAVLKGLQLLKEVETNAIEIMGDSLLVISQLAGEYECKNDTLMVYNEKCQDLMKEFRLVTLKHVSREQNIEANDLAQGASGYKPMIKDVKVEIAAMTADDWRYDVHQYLHNPSQSASKKLRYKALKYTLLDDELYYRTIDGVLLKCLGADQAKVATGEVHEGICGTHQSAHKMKWLLRRAGYFWLTMLEDCFRYYRGCQDCQKFGAIQRDPASAMNPIIKPWPFRGWGIDMIGMINPPSSKXHKFILVATDYFTKWVEAIPLKKVDSGDAIQFVQEHIIYRFGIPQTIITDQGSIFVSDEFVQFADSMGIKLLNSSPYYAQANGQAEASNKSLIKLIKRKISDYPRQWHTRLAEALWSYRMACHGSIQVPPYKLVYGHEAVLPWEVRIGSRRMELLNGKYLKKYYPSVWVNA

SEQ ID NO: 204436 - protein, 68 aa, Oryza sativa
  Clone ID: PAT_MRT4530_99523C.1.pep
MIFSRDKINMIPLEYSRVKCYNGISVRLRMNSLTIIYQKYFCGIAGNYISSNVVKKYQHTASLSGKWG

SEQ ID NO: 204437 - protein, 1421 aa, Oryza sativa
  unsure (1)..(1421): unsure at all Xaa locations
  Clone ID: PAT_MRT4530_99524C.1.pep
MAEKQPPPLSPASPGSVKEKMLKLGSTDVNEGNVVPIDPEKFTPEQKKEFEAMLQQAWDQFLNSFMQTRKGTLVQKYKIKVVADDPGTSSSKDGDGKQALDDSAQPSNKGATDVSLGNQGDNSQGVHGMQAEHQAAGPVYLQGVFPNYRSLITDVQPSIQAVPSVAPTTQPTTPTSTPLPAPSAMAPGQPQQPIQQTPPTQQVVQPIQQQVMQPVQQTPPRQQPLQPIQQTLXKTANRSVDPAPRFNKRIGRVCNAWWSARTTIFKSSCPRTLGSPRTAGWHSNASSCSXHLVRNIQPNLHNYQGGNLNYQYQPPSPQAQYQPGGLAQPQFASQYGQFEPMQQQGAAQQRSWADVIADVMREQFGLKPKETRSLYRQPYPEWFERVPLPNRFKVPDFSKFLGQDGVSTYEHISRFLAQCGEASAVDTLKVRLFRLSLSESTFTWFSSLPYGSINSWADLEKQFHSYFYSGVHEMKLSDLTAFKQRHDEPVHEYIQRFKEMRNKYFSLSLTDAQLADLAFQGMIAPIREKFSSEDFDSLSHLIQKVTLHEHRSAEVRKSSKKVNHVCPYMYGSDDDEADSEIAAAKWVRSKNVIPCQWVKSSGKEEKYDFDITKADKIFDLLLREKQIQLPTSHTIPSAEELGKKRYCKWHNSGSHSTNDCKVFRQQIQVAIEGGKIRFDDSKKPMKLXQTADRVRARGFQANSAKIIDKYQRKYDKQXERHHEEYEDGFXLIGVVSSLDSAGMKNQKIRVQRLRNRERLQEVEQEINHRLRKAKPRQEWRVKNQVPVADDVAADEVKRLAKGKSVVTAPVNMVFTLLAEFGIDQADVNEVEEESAKLVLSPEQAVFEKPEGTENRHLKPLYINGYVNGKPMSKMMVDGGAAVNLMPYATFRKLGRNAEDLIKTNMVLKDFGGNPSETKGVLNVELTVGSKTIPTTFFVIDGKGSYSLLLGRDWIHANCCIPSTMHQCLIQWQGDKIEIVPADSQLKMENPSYYFEGVVEGSNVYNKDTVDDLNDKQVPVIKKNGKVRVCIDFRDLNKATPKDEYPMPVADQLVDAASGNKILSFIDGNAGYNQIFMTEEDMHKTAFRCPGAIGLFEWVVMTFGLKSAGATYQRAMNYIYHDLIGWLVEVYIDDVVVKSKEIEDHIADLRKVFERTRKYGLKMNPTKCAFGVSAGQFWDFLFMKEGSRLRHYLLSNECTVICKADVVKYMLSAPILKGRVGKWIFSLTEFDHRYESLKAIKGQAIADFIVEHRDDSIGSVEIVPWTLFFDGSVCTHGCGIGLVIISPRGAYFEFAYTIKPYATNNQAEYEAVLKGLQLLKKVEAETIEIMGDSLLVISQLAGEYECKNDTLMVYNEKCQELKKEFRLVTLKHVSREQNIEANDLAHGASGYKPMIKDVKVEIAAMTADDWRYDVHQCSFKNI

SEQ ID NO: 204438 - protein, 181 aa, Oryza sativa
  Clone ID: PAT_MRT4530_99525C.1.pep
MGLPDGSAKGEKTRKATDGSEEPSDSGPTTPLPDKKLLVFVLDRLQKKDTYGVFSDPVDPEELPDYHDIIKHPMDFSTIRKKLNKGAYGNLEQFEDDVFLLTSNAMCYNSPDTIYYRQARAIQELAKKDFENLRQDSDASEPEPEPEIKPDPEPKPQPRRGRPPNKNTIKQKVGKPPVERA

SEQ ID NO: 204439 - protein, 731 aa, Oryza sativa
  Clone ID: PAT_MRT4530_99526C.1.pep
MNQDRGQEDEEVEEGINHRLRKPKPRQEWCVENQVPIADDAAADEAVFEKPEGTENRHLKPLYINGYVNGKPMSKMMVDGGAAVNLMPYATFRKLGRNAEDLIKTNMVFKDFGGNPSETKDVLNVELTVGSKTIPTTFFVIDGKASSQSKMENPSYYFEGVVEGSIVYAKDTVDDLDDKQGQGFMSTDDLEEIDIGYNQIFMAEEDIYKTAFRCPGAIGLFEWVVMTFGLKSAGATYQRAMNYIYHDLIGWLVEVYIDDVVVKSKEVEDHIADLRKVFERTRKYGLKMNLTKCAFGVSAGQFLGFLVHERGIEAEYEAVLKGLQLLKEVEADTIEIMGDSLLHVSREQNLEANDLAQGASRYKPMIKDVKVEIAAMSADDWRYDVHQYLSNPSQSASRKLRYKALNYTLLDDELYYRTIDGVLLKCLSADQAKVAIGEVHEGICGTHQSAHKMKWLLRRAGYFWPTMLEDLFRYYKGCQDCQKFGAIQRAPASAMNPIIKPWQFRGSIFVSDEFIQFADSVGIKLLNSSPYYAQANGQAEASNKSLIKLIKRKISDYPRQWHTRLAEALWSYRMACHGSIQVPPYKPVYGHEAVLPWEVRIGSRRTELQNDFTADEYYNLMADEREDLVQSRLRALAKVTKDKERVARHYNKKVVPKDFSEGELVWKLILPIGTHDSKFSKWLPNWEGPFQIHKFVSKGAYMLQGLDGEVYGRALNGKYLKKYYPSVWVNA

SEQ ID NO: 204440 - protein, 97 aa, Oryza sativa
  Clone ID: PAT_MRT4530_99527C.1.pep
MERSIERSALDATAGFVSLLAVHRFAAAKSLLASRITPRLLAVPFTDLAAAARRRGLGRHRSRRCSGELATSTPLTTNPAARPRRRRRLRVGTAPRC

SEQ ID NO: 204441 - protein, 151 aa, Oryza sativa
  Clone ID: PAT_MRT4530_99528C.1.pep
MVRAGTIFREEQRSSAVGIPCEKVTRVRILRGQLRSTVGIGTKLIEELRFRRLRIPGDEVGYEMAHGGSKVVQLAACEQSDRQQQDYVEISIDLRHHRRLYLPLEMAEGGRRHRVARLPPPPFPSSDLVEGRACHRAVTATTGPPPPPSGR

SEQ ID NO: 204442 - protein, 616 aa, Oryza sativa
  Clone ID: PAT_MRT4530_99529C.1.pep
MSAPPRKRKKKGRPSLLDLQKRTLRLEKLQEPPPPPPPPQPRRSTRRNPAGVDSGDEGTAPGGRREKKLRLVMGLPDGSAKGEKTRKATDGSEEPSDSGPTTPLPDKKLLVFVLDRLQKKDTYGVFSDPVDPEELPDYHDIIKHPMDFSTIRKKLNKGAYGNLEQFEVSVRAYGDFCWPFLCCFDFPSLTVSTYSSHTQKKSQVLNMKMLLSANTSTVIKCVEPQDDVFLLTSNAMCYNSPDTIYYRQARAIQELAKKDFENLRQDSDASEPEPEPEIKPDPEPKPQPRRGRPPNKNTIKQKVGKPPVERATADFSGATLASVGNNGHRTQPPFDLQRQVMNGSFIADVLRASFASRNNGYNWSNERKLERIEDYSGSIGKWSAKSGRKPILTEESSRSTYCQPQPSSSIYELPVGVQLQQSYPRSLARFAAQLGPVAWEIASKRIERALPPGTKFGRGWVGDGEAPNATQPPVLTTSSTALIHPSSTETSSEQPTHNGTASTSHSAGPQPSSAPYASSTITTHRVNCQSLPSQQHGSVPQVSAERGEHGAEVKGNHNNLHERPAIQHTVNGFSAVSEKGIFYPVSISNRIYTAIEIGNLAPQTTQSEIRSIEDLN

SEQ ID NO: 204443 - protein, 385 aa, Oryza sativa
  Clone ID: PAT_MRT4530_9952C.1.pep
MSMTIIHITKHSCQLRGSLHGLALEPLSGAIAAGNAVVLKPSEFAPSTAAFLAANIPKYLDANAVKVVQGGAEVGEELMEHRWDKVLFTGNARVGRIIMTKAAKHLTPVALELGSKCPCIVDCLDSKRECQIELLKSTLKRFFTEPEYMARILNEKHFHRLTNLLEDDQVKSSIVHGGNADPKTLWIEPTIVLNPPFDSDIMMEEIFGPLLPIITVKKTEDCIAFLKSKPKPLAIYAFTNNEKLKQRIVAETSSGSVLFNDAIVQRRAHDAPSGRKEAVGSAGPRPGWAVLGRKDRKDPNRKYGLDSVPFGGIGESGFGQYHGKYTFELFSHRKAVVRRSLLVEFMFRYPPWDEYKMGMLRRVFRFDYVSLVLALLAFWLLGIRR

SEQ ID NO: 204444 - protein, 1528 aa, Oryza sativa
  unsure (1)..(1528): unsure at all Xaa locations
  Clone ID: PAT_MRT4530_99530C.1.pep
MTQQPQGTPQQRPWTDMIADVMKEQFGLRPKDAGNLYRQPYPEWFESVPLPNRFKVPDFSKFSRQDSTSTYKLVSRFLAQCGEASAVDALRVRLFRLSLSGSAFTWFSSLPYGSINSWAGWEKHFHRYFYSGVHEMKLSDLTAIKQRHDEPVHAYIQRFREMRNKCYSLSLTDAQLADLAFQGMIAPIREKFSSEDFESLSHLTQKVTLHEQRFAEARKNYRKVNHVCLYIYGSDDEDDDSEIAAAEWVRSKKIIPCQWVKNSRKKERYDFDITKANKIFDLLLREKQIQLPAGHTIPSAEELGKKRYCKWHNSGSHTTNDCKVFRQQIQAAIEGGKIKFDDSKRPMKVDGNPFLVNMVHTVGQTADGGRARGFQVNSAKIINKYQKKYDKQQEKHYEEDGDGFDPHWGCEFFRFCWNEGMRLPSIEDCPRCGDIVESSSRSCSRGNRLRQTRVPVHQRLGPVNQDCSQEENENRKTQWSPSGIFTKNQKRRVQRLRNRECFQEVEQEINHRLKKTKPKQEWHVKNQAPVADEATADEAKRLAKGKSVVTASVNMVFTLPAEFGVKQADVDEVEEESAKLILSPEQAVFETTEGTENRLYINGYVNGKPMSKMMVDGGAAVNLMPYATYRKLGRNAEDLIKTNMVLKHFGGNPSETKGVLNVELIVGNKTIPTIFFVIDGKGSYCLLLGRDWIHANCCIPSTMHQCLIQWQGDKIEIVPADSYYFEGVVEGSNVYNKDTVDDLDDKQGQGFMSADDLEEIDIGPGDRPRPTFITKNLSAEFRIKLIELLKEFRDCFAWEYYEMPGLSRSIVEHRLPIKPGVRPHQQPPRRCKADMLEPVKDEIKRLYDAGFIRPCRYAEWVSSIVPVIKKNDKVKVCIDFRNLNKGTPKDEYPMPVADQLVDAASGHKILSFMGGNAGYNQIFMAEEDIHKTAFRCPGAIGLFEWVVMTFGLKSAEATYQRAMNYIYHDLIVWLVEVYIDDVVVKSKEIEDHIADLRMVFERTRKYGLKMNPTKCAFGVSAGQFLGFLVHERGIEVTQRSVNAIKKIQPPENKDGIARDDRQDNFVRKFISNLSGRLRHYLLSNECTVICKADVVKYMLSAPILKGRVGKWIFSLTEFDYRYESPKAIKGQAIADFIVEHRDDSIGLVEVVPWTLLFGGSGASFEFAYTIKPYVTNNQAEYKAVLKGLQLLKEVEADAIEIIGNSLLXYFWPTMLEDCFRYYKGCQDCQKFGAIQXWGIDMIGMINPPSSKGHKFILVAIDYFTKWVEAIPLKKVDSGDAVQFVQEHIIYRFGIPQTLTTDQGSIFVSDEFVQFADSMGIKLLNSSPYYAQANGQVEASNKSLIKLIKRKISDHPRQWHTRLAEALRSYRMACHGSIHVPPYKLVYGHEAVLPWEVRIGSRRTELQDNLTADEYYNLMADEREDLVQSRLRALAKVTKDKERVARHYNKKVVPKDFSEGELVWKLILPIGTRDSKFGKWSPNWEGPFQIYKVVSKGAYLLQGLDGEVYGRALNGKYLKKYYPSVWVNA

SEQ ID NO: 204445 - protein, 1831 aa, Oryza sativa
  unsure (1)..(1831): unsure at all Xaa locations
  Clone ID: PAT_MRT4530_99531C.1.pep
LQDQINWHASIPKGKFWTCTGVKQIPQASCFSSTCFWHAWWDXRSQKSFLMDDKPPASLSSASPGSVKEKIQQLGLSEVNESNIVTITPDKLTPDQKKDFEAMMQQAGNQFLSSFMQSRKGTVVQKYKVKVVADVPGTGSSKDGEVKQAPDGSAQPSDKGAADGSQGNQGDNSQGVKGVQGDGAQGVQDQVDYEQFGLRPKDSGNLYRQPYPEWFKRVPLPNRFKVLDFSKFSRQDSTSAYEHVSRFLAQCGEASAVDALRVRLFRLSLSGSAFTWFSSLPYGSINSWANLEKHFHSYFYSGVHEMKLSDLTAIKQRHDEPVHEYIQRFREMSNKCYNLSLTDAQLADLAXFQGMIAPIREKFSSEDFESLSHLTQKVTLHEQRFAEARKNSRKVNHVCPYIYGSDDEDDDSEIAAAEWVRSKKVIPCQWVKNSGKEERYDFNITKADKIFDLLLREKQIQLPTGHTIPSAEEXLGKKRYCKWHNSVSHTTNDCKVFRXQIQAAIEGGKIMFDDSKRPMKVDGNPFPINMVHTTSRIADGGRARGFQANSAKIINKYQRKYDKQQVKYYEEDDDGMRLPSIKDCPGYSDTAESSSRSYSRGNRLRQTRVPVHQRLGPVNQDRSREDNETRKXQWCPSSIFTKNQKRRKTKPKQEXRVKNQVLVDDEATADEARRLAKGKSVVTASVNMVFTLPAEFGINQADDDEVEEESAKLILSPEQAVFEKPEDTENRHLKPFYINGYVNGKPMSKMMVDGAVNLMPYTMFRKLGRNAEDLIKTNMVLKDFGGNPSETEGVLNVELTVGNKTIPTTFFIIDGKGSYSLLLGRDWIHANCCIPSTMHXCLIQWQGDKIEIVPADNQLKMENPSYYFEGIVEGSNVYTKDTVDDLDDKQGQGFMSGDDLEEIDIGPEFRTKLIELLKEFRDCFAWEYYEMPGLSXSIVEHRLPIKPGVRPHQQPPRRCKADTLEPVKAEIKRLYDASFIRPCRYDEWVSSIVPVIKKNDLNKATPKDEYPMPVADQLVDAASGHKVXSFMDGNAGYNQIFMAEEDIHKIAFRCPGAIGLFEWVVMTFGLKSAGATYQRDMNYIYHDLIDWLVEVYIGDVVVKSKEIEDHIADLRKIFERTRKYGLKMNPTKCAFGVSAGQFLGFLVHERGIEVTQRSVNAIKKIQPPESKTELQEIIGKINFVRRFISNLSGRLEPFTPLLRLKADQQFTWGAEQQKALDDIKEYRSSPPVLIPPXKGIPFQLYLSAGKKSIGSILIQELEGKERVVFYLSHWLLDAETRYSPVEKLCLCLYFSCTRLRHYLLSNECTVICKADVVKYMLSAPILKGRVGKWIFSLTEFDLQYGSPKAIKGQAIADFTVEHRDDSIGSVEIMPWTLLFDGSVYTHGCGIGLVIISPRGACFEFAYTIKPYATNNQAEYEAVLKGLQLFKEVEADAIEIMGDSLLVISQLTREYECKNDTLMVYNEKYXELMKEFRLVTLRHVSREQNIEANDLAQGASGYKPMIKDIRVKVAALTADDWRYDVHQYLQNTSQSASRKLRYKALKYTLLDDELYYRTIDGMLLKCLSADQAKVAIGEVHEGICGTHQSAHKMKWLLRRAGYFWPTMLEDCFRYYKGCQDSQKFGAIQRAPASAMNPFIKPWPFRGWGIDMIDMINPPSSKGHKFILVATDYFTKWVEAIHLNKVDSGDAIRFVQEHIIYRFGIPQTITTDQGSIFVPDEFVQFADSMGIKLLNSSPYYAQANGQXEASNKSLIKLIKRKISDYPRQWHTRLVEALWSYRMACYGSIQVPPYKLVYGHEAVLPWEVRIGSRRTEALNGKYLKKYYPSVWVNA

SEQ ID NO: 204446 - protein, 788 aa, Oryza sativa
  Clone ID: PAT_MRT4530_99532C.1.pep
MHQCLIQWQGDKVEIVPADSRLKMKNPSYYFEGVVEGSSVYAKDTVDDLDDKQEFRTKLMELLKEFRDCFAWEYYEMPGLSRSIVEHRLPLKPGIRPHQQPPRRCKADMLEPVKAEIKRLYDAGFIRPYRYAEWVSGIVPVIKKNGKVRVCIDFRDLNKATPKDEYPMPVADQLVDAASGHKILSFMDGNAGYNQIFMAEEDIHKTAFRKLEPFTPLLRLRADQQFTWGAKQQKALDNIKEYLSSPPVLIPPQKGIPFRLYLSAGDKSIGLVLIQELEGKERVVFYLSRRLLDAETSHGYGIGLVIIAPWGASFEFAYAIKHRVTNHQAEYEAVLKGLQLLQEVAADAIEIMGDSLLVISQLAGEYECKDDTLMVYYEKCRTLISEFRMVTLKHIYREQNIEANDLAQRASGYKPMTKDIEIEIATITADDWRYDVFQYLQNPSQSASQKLRYKALKYTLLDDDLYYRMIDGVLLKCLSADQAKVAIGEVHEGICGWGIDMIGMINPPSSKGHKFILVATDYFTKWVEAIPLKKVDSGDAIQFVQEHIIYRFGIPQTITTDQGSIFVSNEFVQFVDSMGIKMLNSSPYYAQVNGQAEASNKSLIKLIKRKISDYPRQWHTRLAEALWSYRMSCHGSIQVPPYELVYGHEAVLPWEVRIGSRRTELQNTLTANEYYNLMADEREDLVQSRLRALAKVTRDKERVARHYNKKVVPKDFSEGELVWKLILPIGTRDSKFGKWSPNWEGPFQIHKVVFKGAYMLQGLDGEVYGRALNGKYLKKYYPSVWVNA

SEQ ID NO: 204447 - protein, 51 aa, Oryza sativa
  Clone ID: PAT_MRT4530_99533C.1.pep
MAPRPRLAPAHDRTLGSQPQPPTAHTRRTKVTNRSTAVKANHEPHTQASEE

SEQ ID NO: 204448 - protein, 179 aa, Oryza sativa
  Clone ID: PAT_MRT4530_99534C.1.pep
MGSSRSEGSSSSSARQPYGSPIPYRVGPFEYEPAVLCRCELKAARWISWSVDNPGRRYFKCRNARKGGCDFYAWHDGPTSSFPREVLNDLRGAVHSLRREKADAVKEVEELRVKSEEQCREFASVGRELASVRELVSELDVKNAVLIDSKCRLEKERTVLIWCILSCMCVVILLVLGKN

SEQ ID NO: 204449 - protein, 120 aa, Oryza sativa
  Clone ID: PAT_MRT4530_99535C.1.pep
MAGHTASQLAMEHAQLPGKFGNPRMSFSKMSLINGYPGFHFTDSRYDVCTDRWAIRFLGSARRDYSLFINVYFIFINMLTGGGVNGGHVGSGTGGGENNNTNYVCSNIGDIIVGYVSTTP

SEQ ID NO: 204450 - protein, 48 aa, Oryza sativa
  unsure (1)..(48): unsure at all Xaa locations
  Clone ID: PAT_MRT4530_99536C.1.pep
VPILYEKYEXPLDSYGEKGWVEIKPPYAVLNGKVLSXVTRGPFKNKKP

SEQ ID NO: 204451 - protein, 156 aa, Oryza sativa
  Clone ID: PAT_MRT4530_99537C.1.pep
MAQNTLREFVAHSVDNEPIGPQVKLGDGDFDLKTSDHLDAAAGGAFFYETVRGAVDLIEKMVSNMGWSEEQLQTRQRDMHNVKETEMLAAKLDLLMKRLDDQEKNMPQGTVKALDSHITCGVCSNADHSGTSVVDNGWYGRIFRCQDGGTDLSATF

SEQ ID NO: 204452 - protein, 124 aa, Oryza sativa
  Clone ID: PAT_MRT4530_99538C.1.pep
MAGHTASQLAMEHAQLPGKFGNPRMSFSKMSLISTPLLPRTVEPTRTKINGYPGFHFTDSRYDVCTDRWAIRFLGSARRDYSLFINVYFIFINMLTGGGVNGGHVGSGTGGGENNNTNTVIDYG

SEQ ID NO: 204453 - protein, 251 aa, Oryza sativa
  Clone ID: PAT_MRT4530_99539C.1.pep
MATVGPYGEAEKNEPARPLALPSPSVHPAANDDEEAARAAAAAAGDTAANKRPRSPQYLRRRRCVIWCGGCCVTSAVVVGIVILVLALTVFKVKDPELTMNRVTLEGLDGDLGTSRHPVSVNATLNADVSLRNPNVASFRFDRSETDFYYAGETVGVAYAPEGEVGADSTVRMNVTLDVLADRISPNVNATDLIFGQGYNLTSYTEISGRVNVLGIYKRNLDIKMNCSITLEVSALSTVQSKSTNCVASVS

SEQ ID NO: 204454 - protein, 187 aa, Oryza sativa
  Clone ID: PAT_MRT4530_9953C.1.pep
MREKGKDEGKVRGKGPTAEEGRAKGATGGADVSAGADTRGEVAGDSTARVIGQRRCGRAVEAARQTVGARKQLSAGRGSSRCRRLGNGARKRWSEPMPGRRGWRSGGGEEAVVGTNSGAMKLWAALPIPCPRVSRRGDENANKGEDTQRLKAPHLDPLAEAVPDPRCGRGVPGASAGRATEQGPQIL

SEQ ID NO: 204455 - protein, 40 aa, Oryza sativa
  Clone ID: PAT_MRT4530_99540C.1.pep
MGIIPSQNLNRAECAKLKVTCKAIKGFLQNQGLKGIEYAI

SEQ ID NO: 204456 - protein, 179 aa, Oryza sativa
  unsure (1)..(179): unsure at all Xaa locations
  Clone ID: PAT_MRT4530_99541C.1.pep
KKKKKKKENERGKKKKKKKKKKKKKKKKNIKKKKLTFHIXWARGFLTFGFHVSSLFCRGPFFFGAGRAFPLPRLYLLRVGPLLTLCRPILFARAALFPFGFCLFGVPGDSPLSLGFCPPPCGGSSPPHLSFSPRWARCLPLPFLFFSPRSPAFLFGFLFFFSPSGSRSGPFFSGPPPSF

SEQ ID NO: 204457 - protein, 51 aa, Oryza sativa
  unsure (1)..(51): unsure at all Xaa locations
  Clone ID: PAT_MRT4530_99542C.1.pep
LSPFWVVSVILQELAXSSSLLGLKVDFCTGTAKALGIVLQKAQQSEAYCPR

SEQ ID NO: 204458 - protein, 79 aa, Oryza sativa
  unsure (1)..(79): unsure at all Xaa locations
  Clone ID: PAT_MRT4530_99543C.1.pep
MGGSFSTSRRRRDEYYAVRPSSPPHHYYTYPPPPPPTXYHHHHPSSPPIPSHHHHQHPYRSSPSSHHATSSSLYYYHPP

SEQ ID NO: 204459 - protein, 93 aa, Oryza sativa
  Clone ID: PAT_MRT4530_99544C.1.pep
AQISSYVTCETLGDINRKKLSFIFKIKFIKKKKKKINGGGGGEKKKKKKIKKKKKKKKKKKKKKKKKGGALFKGPKFTSPGLQRNSFFMGPPK

SEQ ID NO: 204460 - protein, 41 aa, Oryza sativa
  unsure (1)..(41): unsure at all Xaa locations
  Clone ID: PAT_MRT4530_99545C.1.pep
IDRNLAQAQALLAFNLPSTNGISPRDXSAPGRITPLGGVLA

SEQ ID NO: 204461 - protein, 313 aa, Oryza sativa
  Clone ID: PAT_MRT4530_99546C.1.pep
MEAGEGAGSPTSGVERPAREKQDGGSEVGGNLIQMSTATPRRTTTGTEEARSGEAGPTSRDCTAERRRCDGGRAHHAHLAAAATRPEAPSASSPNDRGTRSAACIAHDDLAEAARLVDRSRGEAPDAAVATAVKTNAGEVRESKHQAHTAAPVVRAFIGSREAGAWASGVAVLCGALATAEALAGAAALAAAFIGSGEAGASASGVAVLCCALATARRWPPRSLACCACQGGREGGPGGARVGAAAVVVVAVLHDAGEGGALDDFGEVDDDVVLAAAAAAAALLEHPPNRARCRGRRRSAAAQPSAPYPVGLA

SEQ ID NO: 204462 - protein, 78 aa, Oryza sativa
  unsure (1)..(78): unsure at all Xaa locations
  Clone ID: PAT_MRT4530_99547C.1.pep
ASSSSDAVTDPPPPPPRSSNPLACLLFLIDETSXPAPTISWTPSSPPPAPPFPTSTFPFPDPIPSPTTLMTSIFLELE

SEQ ID NO: 204463 - protein, 315 aa, Oryza sativa
  Clone ID: PAT_MRT4530_99548C.1.pep
HRLRRGRSVGVRRGRPLRRAGHGEALAGAAALAAAFIGSGEAGAWASGIAVLCGALAAAVNTVEHGGQVGMVFKLKEADVERRENGEVFETKVALQLGRSTSELKQFRAIASPAVKDEDIKEFAGALGKEDRAEPESVPPPWWWSQYSTTRARAAPLTTSGRLTTTSSSPPPPRPSSSILLIVPDAAVITFDEDGAGAAGSREWEKKKRAPPPPSAGRRRSAAAQPSAPYPSACQRWIIASEVSPSPGLDLLGRAGYTEPRLDILQKMFEFILSPDWIGYTAKRQNSLNPTAGNPYRTPTSHCHIYTRALAQFTF

SEQ ID NO: 204464 - protein, 603 aa, Oryza sativa
  unsure (1)..(603): unsure at all Xaa locations
  Clone ID: PAT_MRT4530_99549C.1.pep
PLILLMHRVSQVPSNRYHSVDGGRDPDAPARRRRXAAEAFGCAPTPAKALEKKLLDLELPPFPAPAKKAAAKVVAAAPKKKLAGGAGGYVLEDVPHLTDYLPNLPSFPNPLQNHPAYSVVKXSEPPLFFFSDSGDLFSLFGLFQVCNXRSFCRQYFVNADDTVAKKIVVHKGSARGTHFRRAGPRQRVFFQPDEVSAAIVTCGGLCPGLNTVIRELVCGLHDMYGVTSVVGIEGGYRGFYARNTVELTPRSVNGIHKRGGTVLGTSRGGQDTGKIVDSIQDRGINQVYIIGGDGTQKGAATIHAEVQRRGLKCAVVGVPKTIDNDIAVIDRSFGFDTAVEEAQRAINAAHVEAESAENGVGVVKLMGRNSGFIAMYATLASRDVDLCLIPESPFYLEGKGGLLEFAEKRLRENGHMVIVVAEGAGQDVIARSMRLADAHDASGNKVLLDVGLWLCAKIKDHFKKKANFPITLKYIDPTYMIRAVPSNASDNVYCSLLAHSAIHGAMAGYTGFTVAPVNGRHAYIPFYRITEKQNKVVITDRMWARVLCSTNQPCFLSTEDVEKAGQDDEEPIVPLVEGENSLVKAPPLLANAGDRAALCNGAA

SEQ ID NO: 204465 - protein, 101 aa, Oryza sativa
  Clone ID: PAT_MRT4530_9954C.1.pep
VPCFVRNKIKRHVHVNDPFSQEISFLIPSHQSSLFAFYLAHKAEFPRGHTQEKSNIYTHRIPHIITHSLARTQKRHGIDCHYVEASRTSPLGQTMQTSYIG

SEQ ID NO: 204466 - protein, 275 aa, Oryza sativa
  unsure (1)..(275): unsure at all Xaa locations
  Clone ID: PAT_MRT4530_99550C.1.pep
MYRLTRDSPDRPNSKQLANLPFPXEETFARHSILGPNGLHGQWTGPVTAIKVQYPSNLDIIKSDVSSLFPSVLNQDGQNGPSTISTDSTQIENDDMKSVLSLDDGRWSKLAEECASVPSVSLEEELSQLSIKQPSPPPVLAELERRPIXTNEDELFDVQDKGSLFTLGWIHTHPTQSCFLSSIDLHNHYSYQNIIAYPDMVMLPEAIAIVMAPTDTRRKHGIFHLSDPGGMGVIHDCPERGFHPHKAPLDGSPIYEHCSHVYMNPDVKFDVIDLR

SEQ ID NO: 204467 - protein, 92 aa, Oryza sativa
  unsure (1)..(92): unsure at all Xaa locations
  Clone ID: PAT_MRT4530_99551C.1.pep
ADPPISPPTPRVGPPRPVNRGEGPPPPPEMEPPGPPGXRGKKGPPKENPPPPPVFPLVRNWPFPAPRELKGPNLANGPPSPPPPPDETPPGG

SEQ ID NO: 204468 - protein, 146 aa, Oryza sativa
  Clone ID: PAT_MRT4530_99552C.1.pep
MVHRTHVLLTKATKRSLIRGSPLPFHNQCGTIQQSPPSHISVPQPFTAPFQRIRAPTGPRSSGIRAPQYQFLSATSSTSRRPVTGDRRPATGRRALGLDLCNRTFLHVRRSVLVERLGKLKTVTHTRRNWRVKPMREQFYGPSEVP

SEQ ID NO: 204469 - protein, 44 aa, Oryza sativa
  Clone ID: PAT_MRT4530_99553C.1.pep
LPYYICGTHYLRPVGVGMSRTGLLLLRDHGRQLQERAADHLVRT

SEQ ID NO: 204470 - protein, 114 aa, Oryza sativa
  Clone ID: PAT_MRT4530_99554C.1.pep
METRHLRRRAEEPEILDLQTLVPQLLLLVHPQVGDIDNIKRSQLGATVQYTQDDGLGEGVTKQGLEMDAGFHGRLKEMREIVAWTRNVVEAAFEHKLKLLEHGELLYHIGEHLT

SEQ ID NO: 204471 - protein, 219 aa, Oryza sativa
  Clone ID: PAT_MRT4530_99555C.1.pep
RCKITRPARTKHCRICDKCVARFDHHCGWMNSRRGGAETGTRVAFLVWHFLICLYGAVILGFILAGELKERKVVYILTGYSGLDRPPAGLFPHVAQWLLAVHNTQILLAVFLAIIALLLGGFCAYHTHLCLTNTTTNETFKWQDYIMWRKKVNEEKAAANGEVRKSPPSKWKAFFSRSHTEADETIVKNNIYDRGMIRNMCEVFVPLSERQSFSRKKSD

SEQ ID NO: 204472 - protein, 153 aa, Oryza sativa
  unsure (1)..(153): unsure at all Xaa locations
  Clone ID: PAT_MRT4530_99556C.1.pep
HLRHLDLSRNSLNSILPAKLLNATELRVLSLADNDISSVLPNGGSVSYLLSLQELNLSNNALAGRLPPALYRLPSLAVLGLTNNYLIGDLAALEGVDLSANXFNGFLSSDFGGSRLRFLNISSNKLNGAIPTELSAVVPANSTCTHSFSKFST

SEQ ID NO: 204473 - protein, 121 aa, Oryza sativa
  Clone ID: PAT_MRT4530_99557C.1.pep
MRSDIEEREPDTRSGGSALRRSGGGAKLGRGAVSANAFYSQYRAGTRNIGDEERRHGAHSPSHLVADAFHRAIAISVVGIMLRTRRCSGWLFYTTTTSGCCRCPYRSSSVLRVTMGAEYRY

SEQ ID NO: 204474 - protein, 49 aa, Oryza sativa
  Clone ID: PAT_MRT4530_99558C.1.pep
WIPGLQDRHEATTSLMGCTVMLRNRGPKTGPYSGRGASNKTMHLRHRQK

SEQ ID NO: 204475 - protein, 90 aa, Oryza sativa
  Clone ID: PAT_MRT4530_99559C.1.pep
MKGDADHDFQGERSENEIEFSPFARQLTITKTKKLIRRHTKKIKSKVPKGAATSQELGSELPPRGPSGNQTDSSSSDDNDSSPTETNPKD

SEQ ID NO: 204476 - protein, 114 aa, Oryza sativa
  Clone ID: PAT_MRT4530_9955C.1.pep
LLLISGVGMGPVLALKYFRYTYRPSAINILQKAERSRGPMYTLVNLESQLRSDMENTNISISTPPVKNKNSVYEPLLSESPISSRRSLVSSSFDIFQPAQSRTTSSFPRNIKAN

SEQ ID NO: 204477 - protein, 236 aa, Oryza sativa
  Clone ID: PAT_MRT4530_99560C.1.pep
MQGLQLLHLANHQQAPPPQQQQQQQPAFHHHHDGGGGGGFVSSGLPPLPNRPRELPSNQFETATSGGGGGCDALLESLLLGDDHLLPRPNPAMLRVGSMPELMYREPSSSHVLHGGGGGGGASDSDVTSQYPPGEEDPHYGGRWDFIFEDVKPKRKAASAVEEISGMFGIAPGSIPGEWFNPGGVGSAAAAAGGSSAPSPGPSSVVTTDDDFTLEMQQIMSSLPLLQPEEHHNWNA

SEQ ID NO: 204478 - protein, 694 aa, Oryza sativa
  Clone ID: PAT_MRT4530_99561C.1.pep
MGSAPLLGTTVDEEDFSPPSTSGRGRGGRKQGRGRGGNSCHQCKRVKPRPEEMVRCQLCGDKVFCAACIKNKYPEMQQAEVRDKCPFCRNICNCTRCNPSDKSDGPRNPFVRRCNSSSSVKRRVKTAASGLRCRVDTAALQAKAIDKLEANSRINNESAMLDKADTLDVRTDEVDTETKSKYANYMLHYLAPHLTKLNKDQMSEIEKEAKIQRLELSQLSVEQAACRHDERVFCDHCKTSIFDLHRSCPGCSYELCIVCCKELREAKLMGSCKEELFSYPNRGPDYMHGGDGDSVPELINYKQGDLSSNQSKDIQWRVDSDKIYCPPTELGGCGNHILQLRRIFSKDWLSKLEVDAFQMRKQLEPSDIIGRDTCECSCSTDHASSRKAASREDSTDNYIYCPTLDNGKPEDLTHFQKHWVKGEPVIVQQVLKKMSCLSWEPPDMWSKVHGTGTSPEMKNVKAIDCLSCCEVEICTQDFFNGYYEGRMYQNLWPEMLKLKDWPTSNHFEELLPSHGVKYMNSLPFQPYTNLKSGLLNVSTLLPDDILKLDMGPKSYIAYGYAQELGRGDSVTKLHCDLSDADANDLACPIKSESAEEGALWDIFRREDVPKLKLYLDKHSKKFRHIYCSAVQKVCNPVHDETFCLTKEQKRKLKEEHGYFTTRKSIFAGGGNSSSQADGRSTCSPKFTGGLEVRI

SEQ ID NO: 204479 - protein, 72 aa, Oryza sativa
  Clone ID: PAT_MRT4530_99562C.1.pep
AKDSNVLFQYLMIPKDLPVFCTIFNSRHICTNNHITWSTSYYSLCITYSHSLHTRSFVPTNVTCVTPHFAIH

SEQ ID NO: 204480 - protein, 533 aa, Oryza sativa
  Clone ID: PAT_MRT4530_99563C.1.pep
MAATAAETAAAATATAGGCRVVRWRRWTFASLGALLSNLGPVWFLIAPLLAAYAPRRLLLTYFNLVLRRRARRLLAAVDPYVTVDIPDPGAADAHQQYYHHRSRLGGRRAGDNAYEEVKAYLSAACSSEARELRAEAAAEGRGLVVSMRDGQDVADEFRGATMWWSSVDEEQQGGGARRRSQRLTFHQLHRRLVVDEYLPHVRRRGRELLFHNRRRRLYTNNKSLSYSSVYHKAWSYVNFDHPTTFETLAMEPAKKAAIMDDLDAFRRSGEFYRRAGKPWKRGYLLHGPPGTGKSTMIASMANYLDYDIYDVELTMVSDNNDLRKLLIETTSKSIVVIEDIDCSLDLTGDRATRRPGEIRGGGSMVTLSGLLNFIDGLWSASGGERVVVFTTNHVEKLDPALIRRGRMDMHIEMSYCRAAAFRTLAKNYLDVDAHHLFDAVDDILDKEDITPADVAECLMAAKRSSDSDVTSSLEFLVDELNKRAMENAKAVAEAKARAEAEAEAKAMADDDSEEDDDHYSDDYTDDDDYDDD

SEQ ID NO: 204481 - protein, 68 aa, Oryza sativa
  Clone ID: PAT_MRT4530_99564C.1.pep
IIAMNKCIPVGSCLAGSPELRGASPVTQIHNSLVPSCEQKFRFQDLKPGWQIPKSELSRLEEMREGLQ

SEQ ID NO: 204482 - protein, 60 aa, Oryza sativa
  Clone ID: PAT_MRT4530_99565C.1.pep
MEIWNVISIESKLRPDTDRSMLEDITDGRFCISDPTPMSTFGRLGRHILGLTKSSRASCY

SEQ ID NO: 204483 - protein, 270 aa, Oryza sativa
  Clone ID: PAT_MRT4530_99566C.1.pep
RATICSPQPVDGLPTGSFLISLDCGLFHTTVVSSDGEVWCWGMERGLGLCPDASFSGVDSGDALRPIRVQSPETNGFKFLGAVQVTCGAAHTVLVAGDGYRMWAWGRGRSGVLGRNQTADSYIPCVVMWPPLDENFQEIHEDRAQASTSGVNDRNSAELEQKLSAASEELEFLRSKLTLMERYANILHISIFRKPLDERTLPRSLQESPVFDIRKEFENILDTAGTDELNRLEIFYRSMLSGVKDKLLKRRVQEMVQECIVSLSSGRQTP

SEQ ID NO: 204484 - protein, 51 aa, Oryza sativa
  Clone ID: PAT_MRT4530_99567C.1.pep
MLVELELPHPATPLAQAVELEVEIKNSRCQGTNSKLLRSLRIARRPRISAF

SEQ ID NO: 204485 - protein, 50 aa, Oryza sativa
  Clone ID: PAT_MRT4530_99568C.1.pep
LVEAIVIDACFTSWCELYLCLVLITVFKLLVSWFQKKKKKKKKKKKKKNS

SEQ ID NO: 204486 - protein, 486 aa, Oryza sativa
  Clone ID: PAT_MRT4530_99569C.1.pep
MASGLWGALGQASSVAQLVGVDALGLVSMVVQAALAARRHRDACRRLGQHVDLVGGLLRELELAELMRREATRRPLERLQGALRRCYALVRACQDDCGYLHRLLLGARMADELRAAQHEIDMFPRRILAFTEIHVQGATKPREIRGKSLEANSTTKFTAKRRKREAVAAAAVNNIHSRKEEERGRRCRRLRRRASSSPLPPSIEAAAASSPQLLPSRIKAAALLPSRIEAAAGNLVDATDGFSENRNVGIGGFGTVYKGQLLDGHTVAIKRFVVDAAIFDFKNPALCDEYESPVIMRCTQVALLCAQEDPTERPTMTDVTRVLNSQSILLSDPKKPTELTDGGHKPAIQAAILIKRSMVEVENPSSLNAKLSGSSTIVVQHQYNSIVIGYLHRLVANASKAMTFIGIRLNLLWTLVSSLLLDKKAREWSHRASPSSCSLTTSVDTTVDWWSNTVSVDTKAYTRDRDATMSSISVATSRRGMAAGEN

SEQ ID NO: 204487 - protein, 77 aa, Oryza sativa
  Clone ID: PAT_MRT4530_9956C.1.pep
VVASSPSFFYLRRVFLFLRAGFCICGWSAAVWSLLLLCLGFFFFVFFVFFLIETCVEIPMLVYRTPMLWAAMQHLDI

SEQ ID NO: 204488 - protein, 84 aa, Oryza sativa
  unsure (1)..(84): unsure at all Xaa locations
  Clone ID: PAT_MRT4530_99570C.1.pep
RSHIHGMRFRKASPLGHRASRPRRRGXSGVGXCXAXVGGAGVWFXAWRCXRAVLDNPLGRRGLVLFRLLSPPYRFLPVFRRPGA

SEQ ID NO: 204489 - protein, 496 aa, Oryza sativa
  Clone ID: PAT_MRT4530_99571C.1.pep
MGFLSLVGNSFGCSASGERLVSAARDGDLQEARALLEYNPRLARYSTFGGRNSPLHYAAAQGHHEIVSLLLESGVEINLRNYRGQTALMQACQYGHWEVVQTLMLFNANVHRTDYLNGGSALHFAALHGHARCLRLVLADYVPSMPNFWNSMKDSLSEEGPSADLDEDGLFKMVNQKADGGLTPLHMAALNGHVECVQLLLDLGASVIEATIEDGTTIDLIGAGSTPLHYAACGGNAVCCQLLIARGASLSAQNASGWTPLMVARSWHRNSLEEILSKEPESRIRTVPSPYLCLPLMSIMSIAREFGWRYLNQSPVCIDPCAVCLEGSCSVAAEGCKHEFCTRCALYLCSTSYTSVSPAGAIPCPLCRHPIIAFTALPGTSPIRELPRNSLSLSFCTTCPAVNSDSTPSIASHLYRTEFQCARMPPMGSSSFRSLSCQRLPAMKLNPSFCMGAMDTNPCLIRCSRFGPSFRRSASQGESSRRAWPLTFDPIAATGS

SEQ ID NO: 204490 - protein, 49 aa, Oryza sativa
  Clone ID: PAT_MRT4530_99572C.1.pep
YGSACVFSLQLIRDVVNVLNIPVKQMGVHALFESIPATIARPLGRAGFP

SEQ ID NO: 204491 - protein, 65 aa, Oryza sativa
  Clone ID: PAT_MRT4530_99573C.1.pep
TGFFWEFFFWDQKNFYEKVILIRHHFFKGKGNFKFCCRGQGQRKSFFWPKFKKRAFSGGESCLKN

SEQ ID NO: 204492 - protein, 104 aa, Oryza sativa
  Clone ID: PAT_MRT4530_99574C.1.pep
MTAVEWRGPLCHQRGRPMAGVRYLLGRSDAFLARSGQRLPRRLIGTTMRTTRWLGGATKRLVGGDDDCSKTIMVVTVVAAAPRQCSRGQQDASTMPYVRDLHTQ

SEQ ID NO: 204493 - protein, 87 aa, Oryza sativa
  Clone ID: PAT_MRT4530_99575C.1.pep
YVCCLQPKTASPGGCLKIWGGHHNSCQTVRALPPGTIWLLPMLNTLANSLLLFKRYGLWLLTMDRFVHEMPQKYMMYYNGSENETDD

SEQ ID NO: 204494 - protein, 733 aa, Oryza sativa
  Clone ID: PAT_MRT4530_99576C.1.pep
MAIIIPGSFHRSTALRVISVLFVLAVVVPDAGGRHQHHRHDCLPFTCGRLSNVSSPFRRRGDPSGCGFTSYELTCTDDKATIQIYEGTYSVTGINYSDSTFWVVDANISDSPNTLPQRIVPPYPTTTLNTGCHTIHIELEPASSRWSAFVNCSQEINNNEKYRPVACLNNTSRSFVYVLIGSIYSCYIDNLEPSCGHLAITPLHGNDTRVLEENPSCEDVVKIMRGGFAVRFPYTIDAAYSFKECRAETFRHFREEPASSAGIKYTMADTATFDIRYMACVIRVARLPAAVKLFVLLTIIAMWLLKWIADDPYCYILVLDCLAFYPQVSCTLAAFTNEICSGPTKSNSRYRYFTLGMTGIVRSNDRKQFGAVKYRYLEVGGGGGAPLVVMTFLAHKCWKKRITIDAVDKFLRMQLMLGPTRSLQGSEKLGQGGYGSVYKGVLLPGNIHVAVKILANYSCDGEEFINEVSTIGSIHHVNVVSLVGFCAEETRRALVYEYMPNGSLEKYIFSPEKSFSWEKLNEIALGIARGINYLHRGCEMQILHFDIKPHNILLDSKFIPKVADFGLAKLYPQDNSFVPVSAARGTIGYIAPEMISWSFGVISSKSDVYSFGMLLLEMVGGRRNSKQDMSSSSQAYYPSWVYNQLAQQELGEVVTSAFNMHELEKKLCIVGLHCIQMNSYDRPTMSEVIEMLEGDVDGLRLPSRPFFCDDEPMPHLVDVGFDRIDLAQSGTIN

SEQ ID NO: 204495 - protein, 462 aa, Oryza sativa
  Clone ID: PAT_MRT4530_99577C.1.pep
MDTSGMFAAAQVPRRQRSRREESMERTEGQVVVLTPSGSTGNGDGDGALVVSTTSSDRNRTPRVRPRETTTVAAAADRSVLGGNGGGSVDVADGDSNNAEKEQRRKEEFDRERRRKGKMVAEEESPSTASGGGMPIGLPAADKLMGDAIRGGRRQHVTTAIGTCKNTKRRGHGKFWASLGRDGASTSSAGSDMVVPLDDIAVVHDRLRSLLNGLGAVSPPVRVYGKMMWRSDRLKSQNRLQISRKKDGELSPFDSILTLAEKSAATSKRKKKSSKPKNKKNGESKEKKDEHKEYNDNGTNKPNNEPNNGDDGLFVQAYDRTGEEYILTLKYIKANNSYRLMGRPWKTFLKNCSLTLQEDAKKKGKKAIKKVKKVAIANEAMIDLWVFRSQKLSHGKDDHNDGRLGLVMVHYFKGDAPHADAAFKANEELLLLAPKKRKKKHEGESSSHDAVTEALPQEEPRG

SEQ ID NO: 204496 - protein, 231 aa, Oryza sativa
  Clone ID: PAT_MRT4530_99578C.1.pep
MAEADGDRGVAAAAAAAAVVHDDVLESDEEDFTFAAAAAVTCVVGGGRIGAVVYPVFGRPRSPPPVQEVEEPDTATVRVPLGQLLLEERASAPPSGEQADEDGVLDGVPAETYCLWSPGSPAPAVSNSPARCQKSGSTGSVLRWRQRLIGRSHSDGKEKFVFLSSGSDVRSKGRTTTTSRGDAGGRGGGWRYYASGGGNGGGRRPSFLPYKQDLVGLFANAGAFRRSYHPF

SEQ ID NO: 204497 - protein, 382 aa, Oryza sativa
  Clone ID: PAT_MRT4530_99579C.1.pep
MHGRRHLAASLARALTYAPSRSISSTPSLLQTLDPSTPSPAAAPPTAGRLAELRQRLQADAPSLGDFTYSVEVGTRKKPLPKPKWMKETIPGGAKYAGIKAKLRELKLHTVCEEARCPNLGECWSGGETGTATATIMILGDTCTRGCRFCNVKTSRTPPPPDPDEPSNVAQAIASWGLEYIVITSVDRDDLPDQGSGHFAETVQKLKVLKPEMLIEALVPDFRGDPACVEKVATSGLHVFAHNIETVEELQRNVRDHRANFKQSIDVLKLAKEYAPAGTLTKTSIMLGCGETPDQVISTTEKVRAAGVDVMTFGQYMRPSKRHMPVSEYVTPEAFERYRSLGVDMGFRYVASGPMVRSSYKAGEFYIKAMIEADRAKATTAI

SEQ ID NO: 204498 - protein, 639 aa, Oryza sativa
  Clone ID: PAT_MRT4530_9957C.1.pep
QSSQQSLFFNSSGSSSNLPPVIEASSALFHLLSIVEPTLHNHFIELKVEPQWFALRWLRVLFGREFCLNDLLVVWDKVFACSNNMLLSSDEEYNFRILCSDRGAFIAAMAVSMLLHIRSSLLATELDVFCLQRLLNFPTNIDVQKLIEKANSLQSIAIDANTSSSSFLLKRDSYEFDRVHSNLSSSTPPRTPLHPVSESYWEEKWRNVHKDGTTPKEVERGNSFSKQLKKSLTQKLGLSRTESDPSPVKVLSVSSNDTRNSVRRCLLNTLSDDLDCSNELAGKTQEDEFPIISVHREHPLSSAEPSKLKAAGENVTVSASCVAKLSPLKKSVVEPANENATQGTKCVPEACSSGENSPVFYAARASAGNEPLNGQDTDSESSSVTSNSFAGDHDRDEILKDEPSSSNDDNKTIQDSEAASSDKSPDRNGTSERAVVSNERKPFISKFQWLLKLGRPSVEGNMEKSSGETSADKQDGDTSCSPSDGNSNNSRGSVKLASGDKKVMGSLKNLGQNMLENIQVIESAFQQDRGQPGPVENFSNNILGGKGQIRFDSIPLSKSFHVQYHSEALYLATIRKITAALSGFQCDIQGIAPNCSEILLAAVLFISWAHAVHASWHNPETEMQQMLMFLSRILSIWLW

SEQ ID NO: 204499 - protein, 40 aa, Oryza sativa
  Clone ID: PAT_MRT4530_99580C.1.pep
IFFGVFFFFFFFYFFFFFFFFCTKDRPLSLLDPSKFPGVK

SEQ ID NO: 204500 - protein, 172 aa, Oryza sativa
  Clone ID: PAT_MRT4530_99581C.1.pep
MRVLKPTPGAPSPAAAAASTSTAFISSSPAVPLPAGVTDSATVLPMPTPGQEQQQAVGMGTLPRARTVQVQLAVPLVMMLFFSALWRQFASSRSAPVVVLLTTAYVEGPFYSTVVGNGLGFYRGIYMVALMKGTLTWVYSVIEVYGPLKGRLANVGPMATGLERLGWPLGSS

SEQ ID NO: 204501 - protein, 368 aa, Oryza sativa
  Clone ID: PAT_MRT4530_99582C.1.pep
MGSTAADMAAAADEEACMYALQLASSSILPMTLKNAIELGLLETLQSAAVAGGGGKAALLTPAEVADKLPSKANPAAADMVDRMLRLLASYNVVRCEMEEGADGKLSRRYAAAPVCKWLTPNEDGVSMAALALMNQDKVLMESWYYLKDAVLDGGIPFNKAYGMTAFEYHGTDARFNRVFNEGMKNHSVIITKKLLDLYTGFDAASTVVDVGGGVGATVAAVVSRHPHIRGINYDLPHVISEAPPFPGVEHVGGDMFASVPRGGDAILMKWILHDWSDEHCARLLKNCYDALPEHGKVVVVECVLPESSDATAREQGVFHVDMIMLAHNPGGKERYEREFRELARAAGFTGFKATYIYANAWAIEFTK

SEQ ID NO: 204502 - protein, 108 aa, Oryza sativa
  Clone ID: PAT_MRT4530_99583C.1.pep
MVGGDVGAGRGVGRGRRGRRAASVAVSAAVVPSAGGGRRGRQAPPINAPGDAPIFAHSAATWWPSEGLGVTQTLGPEECDKIPRAPYTELGASWLFITRASVPPMEEH

SEQ ID NO: 204503 - protein, 629 aa, Oryza sativa
  Clone ID: PAT_MRT4530_99584C.1.pep
MEGHVGGRWWPGCAAAALQLQATATHAGERVAPRHRQRPRLPRPVAPPPDHRAAAAVLVLVVPDAATLAEDDRLRPQRGASLVGGGGRVTACVLVVIVIVVVPPPPRRPYPRPEPLREAHVLRRQAPPRRERVGRRERRRDRAVRPDVDDRDGDSRSLRRRRRRLSLADTAVGLGSDVARRRGHLGCRRGSGGGGGGGGGGGLGGGASHAATAALIPWRGTAPCRGRGAALAPGSLGRRRGGGQRLAGVGDAEREADGDEGRDPRGVEDRGRRDGEPAEEVALVVERGGGGRVRYRRRRHHWYRERERERERESAAGGDRRRRTLEYVATCVHGLVCPIHAATARSLAACVLPYVAVWNARALRSIGPGRQCVAGRGKSPTVPTRDWSSKFQLPSSCQILEVAVIAAGTQIWAKPLTSPAAAGARGSKRPRRRAGGEAATRRRLGGSSGVDGRGSHEGLEEGEEHDQFVLQGLAAAAVPDATTRPTVVAAVAAFLESSSFPCALTTLQSEAKLELRRYGSCCALPFSARREMRRFRTRRREMGERERERMEKKEEEEGNRNDMWAIHVSGSHIILVRMTNGPSTYFFNSRTQTPRQLHMDRKLSQHHHVGAMLAKPPSKTIKRVRLYRF

SEQ ID NO: 204504 - protein, 126 aa, Oryza sativa
  Clone ID: PAT_MRT4530_99585C.1.pep
MTSATTSPPAALRHERRIPTGRARRGELTGNQNGGGKATDGAGDEEEAAAEIGSTAATVLRRSSAAAKRWTGKAATWRSRRWPSRATATTGATAAHGWSGGGDGGARAHGARALRTTRGEGEGGDG

SEQ ID NO: 204505 - protein, 38 aa, Oryza sativa
  Clone ID: PAT_MRT4530_99586C.1.pep
NPYAFSEHVNSKVLLAHTNVFFFFYWKAHTNVVATFYL

SEQ ID NO: 204506 - protein, 322 aa, Oryza sativa
  Clone ID: PAT_MRT4530_99587C.1.pep
MAMDRARRRRHRHPMSAAARSSAFLTLWSAVVVVAAVAPTVAAAGFSCRGGARPVVFNFGDSNSDTGGMAAAMGWRIRRPEGRAFFHHPTGRFCDGRLTIDFLCLPGRVVAEGFRNALYMIDIGQNDVNALLSYLSYDQVVARFPPILDEIKDAIQTLYDNGSRNFWVHGTGALGCLPQKLSIPRKNDSDLDSNGCLKTYNRAAVTFNAALGSLCDQLSTQMKDATIVYTDLFPLKYDLIANRTKYGFDKPLMTCCGYGGPPYNYNITIGCQDKNASCDDGSKFVSWDGVHLTEAANAIVAKGILSSDYSRPKIKFDQFCKV

SEQ ID NO: 204507 - protein, 114 aa, Oryza sativa
  unsure (1)..(114): unsure at all Xaa locations
  Clone ID: PAT_MRT4530_99588C.1.pep
TNGWTLPITHIPTNTLCXYDQVVXTAAMLGAVPYRYSWAGXGEIDLESXYYTLARGTLATVPCHXMTKWFDTYYHFIGPXELGTITNLYYSSLKGVFECKXAKDAXLYTVPILV

SEQ ID NO: 204508 - protein, 344 aa, Oryza sativa
  unsure (1)..(344): unsure at all Xaa locations
  Clone ID: PAT_MRT4530_99589C.1.pep
MSAAAAPAAAVGSGKELANPPTDGISNLRFSNHSDHLLVSSWDKTVRLYDADANVLKGEFVHAGAVLDCCFHDDSSGFSAGADHTVRRLVFGSAKEDLLGRHDAPVRCVEYSYAAGQVITGSWDKTIKCWDPRGVSGPERTLVGTYAQPERVYSLSLVGERAVVATAGRHVNIYDLRNMSQPEQKRDSSLKYXTRCVRCFPNGTGYALSSVEGRVSMEFFDLSESAQSKKYAFKXCHRKSEARRDTVYPVNAIAFHPIYGTFATGGCDGFVNVWDGINKKRLYQYSKYASSIAALSFSKDGHLLAVASSYTYEEGEKSHEPDAIFIRSVNEVEVKPKPKALAAP

SEQ ID NO: 204509 - protein, 66 aa, Oryza sativa
  Clone ID: PAT_MRT4530_9958C.1.pep
VKFFPITFLKHSMISYIYHDRCASWETGSSEFLQRSDGEGAPLVRINRKKRLVWMWQLVLTPFQEK

SEQ ID NO: 204510 - protein, 59 aa, Oryza sativa
  Clone ID: PAT_MRT4530_99590C.1.pep
IFVRLGLNGRHTNKLGHSAMIVWCGRLEQNKAMWCLYLNRVWITSARILYSILWPHQRK

SEQ ID NO: 204511 - protein, 167 aa, Oryza sativa
  unsure (1)..(167): unsure at all Xaa locations
  Clone ID: PAT_MRT4530_99591C.1.pep
FCDGGSSLYEMGRRPISLPALGTPFLGLAAPPCPLPXSPATAMQLCACRAPTAPPPPPSPARXSPLGPAALAPRVWXISAPLASRNPIGTPSPSRAGVAAARPPLLSSGRRRRLRLPLRPPCRRAGHAAAPAMRRRLSAVAAASRTAGHRRRWPCLAAAPPWSAGRP

SEQ ID NO: 204512 - protein, 378 aa, Oryza sativa
  Clone ID: PAT_MRT4530_99592C.1.pep
MTGWCGSTNHKDRKQQYAKKARKPTDEDQSTSKKKDDEDDAPTGFQDSRKELNHIFGGPLAYESKRKQKLTEREINAIQPDTPQYLRWSETAIKFDRLDHPDRVVHPGRYPLRVIRLVVGLWLSALHDVEETKHSSLWMRLPGSRMQTLWRCERRRSMAADYAGRWRRTRSGAAAARVLRVETARRRDGGDTVVRPAAVIGAKGDFLANNTGQIKGICAEEVATVGGGQSLTEAAAGWRTVAMGKGGQRRRQPHAPGGTSIWDTMVFGHQGGPHQAVAQRGGEGGAGQAQLGLKDDRPTKAGRRRGTATDGGDRRCGKRRRRPKGGGAWPEQQRGRRSREGEERRGREDSPATRRPERKTKAATTTRREKGRTSGGDT

SEQ ID NO: 204513 - protein, 508 aa, Oryza sativa
  Clone ID: PAT_MRT4530_99593C.1.pep
MAKLAVPPLLVILVLLQSATRLPVAETSTADEEYMHRLPAATGAERLLGWKADSDPCNGSWVGVTCAPFDGNRIIQIDVRGLLRGGGTLPELDRQAGSLSHLRMLDLGDNNLTGPVPTLFLDRLLTLRLDGNAFSGLPHSFFRGMPELHYFSISDNPRLEEWGLWSDLLSLTELRVFNASNANINGTLQVFLGNLGAFPALAEVSLARNRLTGVVPEKLVSQSIAKLDLSSNGLSGSINFINNLASSITDLRLDHNHFSGPFPADLSGLYLLSVFSVAHNRLTGVVPPSLARVWRLSWVSVSDNLLQGPVPELPDSVKTDFAEAAVKGSFCRLDVHGPCDQETSSLLSVAAAFHYPEILDVSWRRDDPCNGWLGIHCGDGDGGGGGRNKVTGVNLSRLGLNGTIDPAFASLLYLEAIILAGNNLTGTVPASILQMPSLRVLDVSNNALEGTVLSVRHDVLILADGNRGGLNVTAIAASGSFSSSRFQLSEATTPFLTFATVFVALFGY

SEQ ID NO: 204514 - protein, 81 aa, Oryza sativa
  unsure (1)..(81): unsure at all Xaa locations
  Clone ID: PAT_MRT4530_99594C.1.pep
SSDALLGVLIMVNSMWKVLDPXMMCTAXDIAVSRPMMSPVVTPLKESLEXLEEAPGNKGDMENGSKXDTRLSMSMFSPSAR

SEQ ID NO: 204515 - protein, 43 aa, Oryza sativa
  Clone ID: PAT_MRT4530_99595C.1.pep
TEVLLSNYILILFNLCPYIRCDTPKLFTADNTPLRQTCSPGIH

SEQ ID NO: 204516 - protein, 61 aa, Oryza sativa
  unsure (1)..(61): unsure at all Xaa locations
  Clone ID: PAT_MRT4530_99596C.1.pep
DLQKKERMQLXRSSTHASAMVAFLAFPVQAPATVKGPLTNVATHVTEPVHATIWDTFSSSY

SEQ ID NO: 204517 - protein, 138 aa, Oryza sativa
  Clone ID: PAT_MRT4530_99597C.1.pep
CSYPQWAKIYLSVIGVYDWSGNNPIIPELWLLPHFLPIHPGRFWCFCRMVYMPMSYIYAKRFIGPITPTILALREELYDVPYNKINWNNARISCCKVLNMICCWIENPNSNAFRRHVPRIHDFLWLADDGMKSKAALL

SEQ ID NO: 204518 - protein, 62 aa, Oryza sativa
  Clone ID: PAT_MRT4530_99598C.1.pep
MARHHHLALSLPMHNHCPSLPLALSTRLKVPPVEMSAWDNALFPQTDVLSLRLQRYIFVGES

SEQ ID NO: 204519 - protein, 61 aa, Oryza sativa
  Clone ID: PAT_MRT4530_99599C.1.pep
YGGDVWFPQPAPKDHPWRYMPNHAMTPHCSGTTIDGQVHTHNTTLTSSRMRPLTHALRDGK

SEQ ID NO: 204520 - protein, 169 aa, Oryza sativa
  Clone ID: PAT_MRT4530_9959C.1.pep
GHLVHPSATRGYNTHSKPSAVFSSQVQSHQACNPTTCSVCKSLPRIFISHNHPAGAQISPPGIILHLHGPTGQGTLGLSHPTIYTRKYQGCIAYSPSLLSSVRRPHLHTMWRSPSCTSICGHKNVLVPSGAQQQSWSTLYLFPSQAPVNPSWGPPSKVDDLELGGPWYL

SEQ ID NO: 204521 - protein, 283 aa, Oryza sativa
  unsure (1)..(283): unsure at all Xaa locations
  Clone ID: PAT_MRT4530_995C.1.pep
PKPSPYPPLALSPAPPPSPLLFAYSSPYXLPASPIPTPEPNPCPNLLGPPYPPPPPLPYLEPKPELEPNPSCCPPPPPLPPPPPCANDAPPKPIVSPXPEPDPAPYPDSLFVPPPPPLPPPLPIEYPPSXRFVFLPFTISRTRPQTXPNPPFRPPPPPPPFPPPLAYCPLEGPDATDSPXPDPKPEPDPQPLPLLDPPPPPPPVALAYAPLEGPXALASPCPAPEPDPHPPPFSELPPPPPPPPPPLPTSTPVLEYLFTLVALDAPMINKSIVKPRIASLVAS

SEQ ID NO: 204522 - protein, 55 aa, Oryza sativa
  unsure (1)..(55): unsure at all Xaa locations
  Clone ID: PAT_MRT4530_99600C.1.pep
ARRAPADFVLPDRSVGPSPPPAPSGSCSTTSPSPAPPPPPXXPPPPHQQTTNNPP

SEQ ID NO: 204523 - protein, 92 aa, Oryza sativa
  unsure (1)..(92): unsure at all Xaa locations
  Clone ID: PAT_MRT4530_99601C.1.pep
ETSPAGSTHXRXRXTEPVLXXSLTLXAAAVXNAARXLDVVVPAPXRPDGVTVSGEDFIGSLXGHVRSXIVSRLPVXDAAXRTGCLXSSQWDE

SEQ ID NO: 204524 - protein, 390 aa, Oryza sativa
  Clone ID: PAT_MRT4530_99602C.1.pep
MAALAAVAVLVVAMVISGGGGVAAAVTSKKPVIYIFGDSMSDVGNNNYLILSLAKSDYPWYGVDYETGFPTGRFTNGRTIGDIMAAKFGVPPPPPFLSLYMTDDEVLGGVNFASGGAGLLNETGIYFVQYLSFDNQISSFEEIKNAMIAKIGKKAAEEVVNGAIFQVGLGSNDYINNFLRPFMADGIVYTHEEFIGLLMDTMDRQLTRLYDLGARNVWFSGLAPLGCIPSQRVLSDDGGCLDDVNAYAVQFNAAARNLLERLNAKLPGASMSLADCYSVVMELIEHPQKYGFKTSHTSCCDVDTTVGGLCLPTAQLCDDRTAFVFWDAYHTSDAANQVIADRLYADMVSAGAVQGNGNATTAAAASTPAPRVVVGGGASPSTHAAPPPKP

SEQ ID NO: 204525 - protein, 674 aa, Oryza sativa
  unsure (1)..(674): unsure at all Xaa locations
  Clone ID: PAT_MRT4530_99603C.1.pep
ARRSTRALATSAGGTTLLAPSSPGLKEELPXLLLVQLSDTVQQAAAIALVQETVLLESGQKPLNKLTYKGVGTXVDTSVPISEPSTIKPERAELCKAKQLTEYGKAIGPCRTCGVIQSRHHRWVLTVVAEGDAGRVEVWQDLRRRPVLIEYSANSVFQFTFLQKCQCEIEIEVEEEGGLFAIVKEKRLWLFXGCLLISTRLXPLLSPIGPVDINKLSWSWAFFFLHCCSLGLKFXQGNLRIILXNSREVVSCNFCCYIVTPRIRPHXAGGVCGGAPEHSCAFGTMNYASLWVYVYDMFXDLIILSXSPNKEKKITLYPDAAPVNSKPYRYSPLQKDEIERQVKDMIDSGLITPSMSPFASPVLLVKKKDGTWRFCVDYRKLNSVTVKSKFPMPVVDELLDELAGTQYFSKLDLRAGYHQIRMVEQDEFKTAFKTHHGQFQFSVMPFGLINAPSTFQCLMNSVFASLICKCVLVFMDDILVYNPNLDSHLHHLRQVFMLLRQNQLYAKMSKCSFACAQLEYLGHIISAKGVSTDPAKTAAMLAWPVPQTATELRGFLGLTGYYRKFVPNYSIIAKPLTVLLKKKAFLWSDAAQQAFQQLKLAMSSTPVLALPNFSLPFVLETDACAYGVSAVLSQLNHPIAYYSKALGPANQKFSIYEKEFLAIMMAVDKWRCYL

SEQ ID NO: 204526 - protein, 80 aa, Oryza sativa
  unsure (1)..(80): unsure at all Xaa locations
  Clone ID: PAT_MRT4530_99604C.1.pep
RAYGVICYKVRDSLVVLVVSSCVFFFHVFFSCGSLFCVCFXICHALVRLLLYVIFLSXSYLFSMVLYCKLSVRIFLFKKK

SEQ ID NO: 204527 - protein, 251 aa, Oryza sativa
  Clone ID: PAT_MRT4530_99605C.1.pep
MASRSSALLLLFSAFCFLARRAAADYGSWQSAHATFYGGGDASGTMGGACGYGNLYSTGYGTNTAALSTVLFNDGAACGSCYELRCDNDGQWCLPGSVTVTATNLCPPNYALPNDDGGWCNPPRPHFDMAEPAFLQIGVYRAGIVPVSYRRVPCVKKGGIRFTINGHSYFNLVLVTNVAGPGDVQSVSIKGSSTGWQPMSRNWGQNWQSNSYLDGQSLSFQVAVSDGRTVTSNNVVPAGWQFGQTFEGGQF

SEQ ID NO: 204528 - protein, 243 aa, Oryza sativa
  unsure (1)..(243): unsure at all Xaa locations
  Clone ID: PAT_MRT4530_99606C.1.pep
TRPRISRGAEIYTPFAFVSVEDTSKPSNEKLRGQLRIYDLTKGRQVGSLLAETRKPEMIVASSSGEFLGITNKRKLHVWRIPTKNFKPDKIRKIKLSHTKNLNTLAFHPSERIVASGDATGRILIWRGFGNAKFSGSDGTKSELDEDRGDVRGNGDADTCTTWHWHSSGVRFLKFSTDGAYLFSGGMEGVIVVWXLDTGKRRYKPRLGSPLLSFVDSPDSSIACVSCMNNQXHLLKCPHGGMK

SEQ ID NO: 204529 - protein, 250 aa, Oryza sativa
  Clone ID: PAT_MRT4530_99607C.1.pep
MAFHDHVTFQDDEIDLEAGHTPPPPPPPADHETKLPKRQQQQRKKKKKRGCCCRLACAALVLVAAVAAAAGALYLALDPRLPRYAIESLTVQAFDMDYDGHGGEYGYGDPQLTARASFDAAVRFENPNRAIDISYEEGSSLAVFYGGHRLSEGALPAFYQGHGDAGVVHVAMGDATLEGAGAVAEAMQQVVGGGGELPLVFRGEVPVRVKVGPITTGKLTPTIRCDLVLDRLSTEGEIRVKNMSCKIKLW

SEQ ID NO: 204530 - protein, 222 aa, Oryza sativa
  Clone ID: PAT_MRT4530_99608C.1.pep
MATASSLFLASPVATAPTARARSTPSASPARPSLRLRRPSTLAAAAVQAEHQPAVAAAPKPPALPFRVGHGFDLHRLEPGLPLIIGGIDIPHDRGCDAHSDGDVLLHCVVDAILGALGLPDIGQIFPDSDPRWKGADSSVFMREAVKLMHEAGYELGNLDATLILQKPKISPFKETIRSNLCDLLGADPSVVNLKAKTHEKVDSLGENRSIAAHTVVLLMRK

SEQ ID NO: 204531 - protein, 80 aa, Oryza sativa
  unsure (1)..(80): unsure at all Xaa locations
  Clone ID: PAT_MRT4530_99609C.1.pep
NRNLAHVNICPKSTGLRKMKMGXKLFXLLFIPLSSEEQLNPTLHIHFNXHLIIIIIIIKQKKKKFPPDDRSMRLQINREW

SEQ ID NO: 204532 - protein, 212 aa, Oryza sativa
  unsure (1)..(212): unsure at all Xaa locations
  Clone ID: PAT_MRT4530_9960C.1.pep
HRPATSSAANWCPRLYGWLVTPPFMGVHVFTDRLAFAAANWXYATVHGRTRLHRPVGLRRCRLVFPXPPFMGVHVFTDRLDFPAANWCFRGWLVTPPFMGVHVFTDRLAFAAIDWCFRGCLVTPQFMGVHVFTDRLASVATDWCPRLYGWLVTPPFMGVHVFTDRLDFAAVDWCLPSPPAVIITADRFLRFHGWCIPPPLLMATMSSLLAAV

SEQ ID NO: 204533 - protein, 72 aa, Oryza sativa
  Clone ID: PAT_MRT4530_99610C.1.pep
FILLFFLFFFSFIFFVFDHHISFSCLIKIMKVTSTNPRVKCEQRHCNCTSERAHAPTADTCHLATALMVLGK

SEQ ID NO: 204534 - protein, 46 aa, Oryza sativa
  Clone ID: PAT_MRT4530_99611C.1.pep
FFFFFFLKQFSKETVIHFVNDNNGNPQKVFFLLGVQLQMLPFFSFP

SEQ ID NO: 204535 - protein, 140 aa, Oryza sativa
  unsure (1)..(140): unsure at all Xaa locations
  Clone ID: PAT_MRT4530_99612C.1.pep
LLYINIYNPNGLPPHMLKLKLNYPIILLRNIDLANGLCNGTRLVVRGFQXNTIDTVIVLGQHSGTRVFLPRIPLSPSDDEMFPFQFKRKXFPVRLNFAMTINKAQGQTVPNIGIYLPEPVFSHSQLCVALSRATARKTHK

SEQ ID NO: 204536 - protein, 80 aa, Oryza sativa
  Clone ID: PAT_MRT4530_99613C.1.pep
GPSGCPGRSRGCTNAWMRRRPRCRCCLGFRGMRHGWEGDGEFGVSSCRRCWISEGGICNFPPGRVEEPPRFPHRAAARIR

SEQ ID NO: 204537 - protein, 619 aa, Oryza sativa
  Clone ID: PAT_MRT4530_99614C.1.pep
MKMIIVTTAQEEGTEADPYGIVWVAADPAEAGNQFKEDEELSLKKTEADRGHVKKETVGASTGTSLARSSREKQELEDNQWQETQASPVRGEQQVDAFIADLSTPLQQPLLPAPGEKQRRLCRNKVTISVQHQSARLATKARQNSKFESFAQEILANKFGVLDDNKRLDARIKSLYLQQYKKPLSPAAVKTIAALETKLDDVSDSVMLRTLGGRFVRSYAYLPADGSRGGILLACDDNYFSISDITLRQYSLSATITMKEEILAWSITVVYGPQLEEQKLPDFMEVTAQSWNRPIGATNPLAKFHLKLCRLGRDLKRWSRTHVGDIKLRLAIANEVIFQLEVAQESRILSDEEYQLRKDLKLKDQKMIELNRFFNLRLGVPGTRLNRLNWARINLPSVDLSELEADFDEEEIKDAILNLAPEKAPGPDGFTGAFFNCSSRILLNGIPGDHIFHARGLRQGDPLSPMLFILVMEPLHQIIKAAEDANIISNLCQRQGRFRCSLYADDVALFALPTEDELIALKRILLFFAQISCLHTNMSKTEIYPISCSDIDLDNILTFFPGNKKNFPCKYLGLPLHTRKLKKIDLQPLVDKIGSRIKDQGSLYGFAVVDFERGLSDMF

SEQ ID NO: 204538 - protein, 211 aa, Oryza sativa
  unsure (1)..(211): unsure at all Xaa locations
  Clone ID: PAT_MRT4530_99615C.1.pep
ANFGQKEAINVKVSDICDLNPHEALGNSYVVNIIIRDLVPAEPWWYIACSTYKRGTAREGNAYKCPRCSTDAIETRYRVVIMGIDPSDLANDQAKAAEFTFFGEIGEQLIGRPVLNLVASVHGARDIVPPEIKAIFGRQYVIRTSVSRGSLQRNRVSYQVIAIAHLDKKRKSSMADEXLXHGGSSPDEHDRRKPSVVHTLFVDKLPPELPK

SEQ ID NO: 204539 - protein, 68 aa, Oryza sativa
  Clone ID: PAT_MRT4530_99616C.1.pep
MAPTRRRPCGLWRPGARAATLVLRPPLSSPPLHRAKRPDGRTQTKDGSFYLGFESSHTGMVHGLWMNN

SEQ ID NO: 204540 - protein, 84 aa, Oryza sativa
  unsure (1)..(84): unsure at all Xaa locations
  Clone ID: PAT_MRT4530_99617C.1.pep
SCMWVTSXHAVGVLFSQFYLSRYSTVLYFIIFCYIFLMVFPSLFSIIHNFCFYCPFSYHFSIFIFSFFFFFFFYFLIFIFFLFL

SEQ ID NO: 204541 - protein, 437 aa, Oryza sativa
  Clone ID: PAT_MRT4530_99618C.1.pep
MSDGQETDKNIEIWKIKKLIKALESARGNGTSMISLIMPPRDQVSRVTKMLGDEYGTASNIKSRVNRQSVLAAITSAQQRLKLYNKVPPNGLVLYTGTIVTEDGKEKKVTIDFEPFKPINASLYLCDNKFHTEALNELLESDDKFGFIVMDGNGTLFGTLSGNTREILHKFTVDLPKKHGRGGQSALRFARLRMEKRHNYVRKTAELATQFFINPATSQPNVSGLILAGSADFKTELSQSDMFDQRLQAKILNVVDVSYGGENGFNQAIELSAEILANVKFIQEKKLIGKYFEEISQDTGKYVFGVDDTLKTLEMGAVETLIVWENLDVNRYVLKNSATGETAIKHLNKEQEADQSNFRDTSTNAELEVQDKTSLLEWFANEYKKFGCTLEFVTNKSQEGSQFCRGFGGIGGILRYQLDIRSFDELSDDEGVYEDSD

SEQ ID NO: 204542 - protein, 57 aa, Oryza sativa
  Clone ID: PAT_MRT4530_99619C.1.pep
MTVVGTRAVSATSLLPSWWCWGGTARYAISSNTSEVAAVEAEAKDADRRKGELAWRK

SEQ ID NO: 204543 - protein, 425 aa, Oryza sativa
  Clone ID: PAT_MRT4530_9961C.1.pep
MEPANPPIPPPPPPPPPTRKPTRKRGRGATKGDDPVPDEAAPPCKPSLPLATGSRRGRSHVPPPLGVGGDGGEEGVDFVSHLPDAVLGIIISLLPSKDGASDLAPGANGAALAVLLTHILLAHAGPVRRFCIPAQQIHERPAMVEGWLTSPRFNNLEELEFTEDLCYMRQLLPLPPSIFRFSNTLRVAAFSQCRVPDCTDLMLQFPHLKLLSLRQLLHIERSMGLGVRVSVIMAPKLETLGILDNVNDVYSRLNFGTVVFKGFEVVNFTRPVSSVKVLALIMDNLSLDRVIKLMICFPCLEKLYIRGIKYGETNYWRRKYGKTIKSLNICLKTIVLDDYRGSKPQVQFARFFIWNAAKLENMIFMSGPNNDNTYVIAEQPKLLEFEKRASKTAHFHFRSKKCYYDWVHIKDVHDLSLSDPFECTC

SEQ ID NO: 204544 - protein, 238 aa, Oryza sativa
  Clone ID: PAT_MRT4530_99620C.1.pep
MSRRQARARAAVRSESSARSALTESSAAVELAMTPSTTPVVPTTFPGTGHSIFDISYATPAHHPPAAAAASASFSSAATASGLLSPPSPPASSFPASSAPSTTVANASCYSCSCPFLFSAAPAPLDFEAAPARWPRQPAAAVRERDREIAGGRGWRRKRAMRRRAAEGVVVVVVGVVAMARRGGRGNRRRWSGRGIGRSREGEGGEGSARCGDGGDEEAGGGEGGGGGGRRGRHGFPV

SEQ ID NO: 204545 - protein, 113 aa, Oryza sativa
  unsure (1)..(113): unsure at all Xaa locations
  Clone ID: PAT_MRT4530_99621C.1.pep
HNNTQAAHQSYTGAAGIXSEPQHQPRAGTAEEDVEGRRRRGGGARSTGDGATGRDLEAPWLSSAPRVEGQPLLPCLRRGGVEIAHAALENPSLRTRACXRHSSSIVSPNSIHC

SEQ ID NO: 204546 - protein, 119 aa, Oryza sativa
  unsure (1)..(119): unsure at all Xaa locations
  Clone ID: PAT_MRT4530_99622C.1.pep
MAQLHATTGKRELGRANRGHLREEHDDANSPVQETTTDDDERRPATRTNGGAARLDDGGVAPTACDGGDGAAEVLLHLANPVATTDGDGDDAGGGAARLERRRLGXRGGGATGNGDGLD

SEQ ID NO: 204547 - protein, 167 aa, Oryza sativa
  Clone ID: PAT_MRT4530_99623C.1.pep
MAATHPLLLLLLAAAAVVVLVVAATPAAASGNGTSTPTAYEMLERYDFPRGILPVGVEGYELREDGSFEVYFPRDCEFMLARTWLVRYGARIAGAAASGRLTSLQGVYVKVLFVWLPVGEVDRSGDTLSFYIGPVSTSFPLSDFAHSPHCRGYDHLPAAAAAAAAAL

SEQ ID NO: 204548 - protein, 423 aa, Oryza sativa
  Clone ID: PAT_MRT4530_99624C.1.pep
RTTNPSPARPPEKERERERSRPQQWRPLPPSTPPRGWDPPPPSPPPPPLAADQPPRRGACAWRRRPDRARRGGRGEGWWRAAVASKAESPASAASSKSDGHEVLLFEALREALIEEMKEDPTVCVFGEDVGHYGGSYKVTKGLAEMFGDLRVLDTPIAENSFTGMGVGAAMKGLRPVVEGMNMGFLLLAYNQISNNCGMLHYTSGGQFKIPIVIRGPGGVGRQLGAEHSQRLESYFQSIPGLQMVACSTPYNAKGLMKAAIRSENPVVLFEHVLLYNLKEKIPDEEYVLCLEEAEMVRPGEHVTILTYSRMRYHVMQAAKTLVNKGYDPEVIDIRSLKPFDLHTIGNSIKKTHRVLIVEECMRTGGIGASLRSAIIDNFWDYLDAPIMCLSSQDVPTPYAAPLEDATVVQPAQIVAAVEQICQ

SEQ ID NO: 204549 - protein, 84 aa, Oryza sativa
  Clone ID: PAT_MRT4530_99625C.1.pep
YSQGSLPPCWLNYRMCDLGRASCRSPGRPCPPCVRLQRPSMVTFARFQPMFVTPRWVPPYLIEIVVTHTYGVLSLCALLTHDRM

SEQ ID NO: 204550 - protein, 146 aa, Oryza sativa
  Clone ID: PAT_MRT4530_99626C.1.pep
MAKPAPAPAAGAREDEDAPALRRRLRRLVAAATAGAASESVLDEAAAALAALRDAEVGVGRKGAGGGEEAAAAAVPALFLCPISSGIMRDPVVIESGQTYDRRSIQEWFSAGNQICPQTQQVLSHTIVIPNHLVRTMISQWCTENG

SEQ ID NO: 204551 - protein, 377 aa, Oryza sativa
  Clone ID: PAT_MRT4530_99627C.1.pep
MRSPRDLVVAVALLQLSVLLLLLSGEPAAAAGKSKVAAIIVFGDSTVDTGNNNYLSTLVRSDFAPYGRDLQLAGAGVSGGGNGRPTGRFSNGRLAVDFISEAFGLPPLVPAYLDPAVNMSSLGAGACFASAGAGYDNATSDLFSVLPLWKELDYFKEYAARLRSFRGDDDAAAAAAAATLSEALYIVSMGTNDFLENYYAVARGHAAEYSTAAAYGDYLLGVAEAFVRELHALGARKVDLNGLPPMGCLPLERATGGACTEEYNAVAGRFNAGLQDMIARLNGELGGGARIVYGDVYGAVAAVLADPAAYGVENVKAGCCGVTGVFEMGYMCGAGARSPLTCTDASKFAFWDAIHPTERLHRAIADAKMNTTLHVFL

SEQ ID NO: 204552 - protein, 516 aa, Oryza sativa
  Clone ID: PAT_MRT4530_99628C.1.pep
MAKPAPAPAAGAREDEDAPALRRRLRRLVAAATAGAASESVLDEAAAALAALRDAEVGVGRKGVGGGEEAAAAAVPALFLCPISSGIMRDPVVIESGQCEVWILYIILASQFHAIGVFSVTTCLYEYRGEFLLFKYADMMRFSRNMEQNSKSTNMTYDRRSIQEWFSAGNQICPQTQQVLSHTIVIPNHLVRTMISQWCTENGLTLPEIENQEQDHVTNSEEKTFDEIFVKITSSANSGGRKQAIKDLRLLTKRNSEFRAVLGQRPDSIAQMILARSTPGLQNDPQVLEDMVTIILNFSIHDSNKKIIGDDSEAIQFLIWALKSGDMGSRSNSAAAIFTLSALDSNKEKIGKLGAMDPLIDLLEHGSIIAKKDAASAIFNLCLLHENRSIAARSGIVDVAMRAIDDQSLVEESLAILALLSRNQEMVEIITEFNGTASMLRSIRESECKRSKENAMVVLFAICTYNRTKLKEVEADESINGSLTFLAQTGTQRARRKASGILEKMKRTMHNRHCSC

SEQ ID NO: 204553 - protein, 84 aa, Oryza sativa
  Clone ID: PAT_MRT4530_99629C.1.pep
MDPMMESLRERTSMVWDAISLPDDSHLLAGGWRHVVPKQERVRKNMFKVQPDTVTRMLVWFRPLSPLLPIPNKPSSRRNREDHD

SEQ ID NO: 204554 - protein, 320 aa, Oryza sativa
  unsure (1)..(320): unsure at all Xaa locations
  Clone ID: PAT_MRT4530_9962C.1.pep
QQRPHRPATSSAANWCPRLYGWLVTPPFMGVHVFTDRLAFAAANWCLRLHGRSIMPLLLGVYDFTXRPASITADWCPRLYGWLVTPPFMGVHDFTDRXTSPLPTGVSACTAGLLCHHCWASTTSPXGLPPSPPTGVLAYTVSWSHHRSWASTSSPTGWTSPPPTGVSACTASLLCHHCWVSTTSSLACLRHRRLVSSPIRLVGHTTVYGRPRLHRPASLRRHRLVFPPARLAYYATVVGRLCLHHRPASVAADWCPRLYGCLVTPQFMGVHVFTDRLASVATDWCPRLYGWLVTPPFMGVHVFTDRLDFAAVDWCFYQHG

SEQ ID NO: 204555 - protein, 74 aa, Oryza sativa
  Clone ID: PAT_MRT4530_99630C.1.pep
CMYIIKLVHVGKQFLQMGVIFPTRSLPVAIGPSYISVFQAILLYLSNIVNLYYCEVVAGAKYLSLNCKYEEMIV

SEQ ID NO: 204556 - protein, 345 aa, Oryza sativa
  Clone ID: PAT_MRT4530_99631C.1.pep
MAGVDRSRRSSSSPPPLPWTVRVQLAALSAAHRSDGSVRRLLFYLGDLHAAASPRPDAAGVRSVDVTIDASRGLWARVFCPPTNTAAVKLPVVVYFHGGGFVLFSAASRPYDALCRRISRGVGAVVVSVNYRLAPEHRFPAAYDDGLAALRYLDANGLAEAAAELGAAVDLSRCFLAGDSAGGNIVHHVAQRWAASTTSPSSSLRLAGAVLISPFFGGEERTEEEVGLDKASLSLSLARTDYFWREFLPEGATRDHAAARVCGGERVELAEAFPPAMVVIGGFDLLKGWQARYVAALREKGKAVRVVEYPDAIHGFHAFPELADSGKLVEEMKQFVQEHSSNRMA

SEQ ID NO: 204557 - protein, 391 aa, Oryza sativa
  Clone ID: PAT_MRT4530_99632C.1.pep
PCPLQYFFSLWKFSLTEHAQLREGPPTISELRNSAAASGGAGDGGGGGGSHVAVAAEVEEAGAAALGAHVGGLPHHEVHEASPAAGGDEDVGAVVADGVAAAGAGGRLVGGGERRERGRHGGAPAAAGAAAAAAAAATAAAALLVVAVAAVVAVAVAIAAVAVAVAVAVPAAVVRAPRRRRRGDRAHGRHGGVPRRRGGRRRGGGAASAAAAPRARAAAGGGRRGPRRRRRRVRRRRARIDGRPGAVLPPSSSSSPAVEGAVAQRRGDHLDVRGSRQVHYHHQHPTPPPLPLLLLLLPQRLPMPRWWWWCAWPPLPSPEPEPDPPPLCLPTAAARGRAAAAPSSSSDPPSPRLLPNLKAAAAVVLVVAVVLVRSATVTPPPHRPPAAATTK

SEQ ID NO: 204558 - protein, 327 aa, Oryza sativa
  unsure (1)..(327): unsure at all Xaa locations
  Clone ID: PAT_MRT4530_99633C.1.pep
VSPFLGFNFFGFLFLRAGGGGGRDKGGTFPRFGRRGICAGDGGPRAGPGQWFGLSSGRGGGVGGWGGGGGGGGGGGGGGGRRRGRRAAAAEGSDDSEGVTVELNSEVALPYHWEQCLDIRTGQVYYINWEDGTRTTIDPRSSSAYSPSPASRSASSSSRRCSRARGRGGGGGAAAAASTTTSSGYTSVSSVGAVTAAAAAWRSHDSSGHGYGYGYGYGSXATATATTAATATTRRAAAAVAAAAAAAAAPAAAGAPPCRPRSRRSPPPTSRPPAPAAATPSATTAPTSSSPPAAGLASCTSWCRRPPTCAPSAAAPASSTSAATATS

SEQ ID NO: 204559 - protein, 118 aa, Oryza sativa
  Clone ID: PAT_MRT4530_99634C.1.pep
PRVRPRVRIVDPVQLSATRVNLYQSAVTSPLRNVNAHSLVSIEQGHARTLVVSHLGMTVCNGALRSAQSLIIPQHFVVLKKAEHEGCQYITFKTDANSMVSHLGRKNSTMRAMPADVI

SEQ ID NO: 204560 - protein, 87 aa, Oryza sativa
  Clone ID: PAT_MRT4530_99635C.1.pep
LPTYRRDGHPPPHLRHPPPRRLRLVRRRAAVRQLSPQPRRAGCPRVRLAPAGRGGELARSGAIGDAVAQANATAPDEEEEEEGALWE

SEQ ID NO: 204561 - protein, 125 aa, Oryza sativa
  Clone ID: PAT_MRT4530_99636C.1.pep
MGDSLSCQRNTDDDAAPPPPLVPVGGQQQPEYMSSEQVRTRRGQPSSRNRGVGVADEYQTRRGVDDNVGVPISSQPPTLRPQNFMRFCATCNRTLSPQMNVYIFRKRIKLLLNNCNILLYNDEVD

SEQ ID NO: 204562 - protein, 425 aa, Oryza sativa
  Clone ID: PAT_MRT4530_99637C.1.pep
MSGEAESREASRQRRRRERAAAVERFVGVPLADVVRENSLVHLPPAAAARLRVVHPSWASHMSSPLFAVAHAAAPRRVSGVFVPSAGFLPFDGDDDAVPSPSLSFVPASSELVVLSSSRGVACCFSPADDAYAVCNPATASWTAVPSPPWRSWPRPAIVVLFDTSAYNFRGDFTLVCPFESEPGSSGAYCFQVFTSGTGAWWVTDAMSPAEGLVAASGVAAGATAWWRTSIGTAVGYTPVTGRVDLVTCPGDSDQWEIGLAAGMLHCAVIDGGDVVVFRLHEHGIWEVTTRVAVAEILQPSQPPPPARATTSTEIVASQQHDESGAEEEEGSRAVVAAANAPLRLDDGVRLLGFQGAEVEVVVLAGRRLVAFDARTRRRREVAVPDEVDAAWDGAEHAAHINTLALIAPAALAAEPPLAKPPADP

SEQ ID NO: 204563 - protein, 107 aa, Oryza sativa
  Clone ID: PAT_MRT4530_99638C.1.pep
VKIKHRGGGLRPKKKESSFVLGYVVDIPIKNRLNIFFFRFGYGPFQGPLLLKKMEKFFPPLSGGFFCKSPPIFVGWGFFKKKLGFFSPKKKKKKKKKKKKKKKKNPT

SEQ ID NO: 204564 - protein, 168 aa, Oryza sativa
  Clone ID: PAT_MRT4530_99639C.1.pep
MAAPASAAAAAGLAGMSTDNAKGLILAVSSSAFIGASFNVKKMGLRRAADSGVRAGIVGEIANFAAYAFAPAILVRLLGALSIIISAALAHAILQEKLHTFGILGCVLCVVGSITIVLHAPQERNIDSVREVWDLATEPGFLCYAAIVVAAALVLIYFVVPPHVQTMT

SEQ ID NO: 204565 - protein, 111 aa, Oryza sativa
  unsure (1)..(111): unsure at all Xaa locations
  Clone ID: PAT_MRT4530_9963C.1.pep
CRFGGGEPTLAVKRSAGGSGGFVGDAKAATAWMLWAAKAVDRTAESEPRERRLARSXGGGELACGVSGALPQRAEGQGGGKDDAATGHGRRPSGMARAHGAAGRQRTTQAL

SEQ ID NO: 204566 - protein, 98 aa, Oryza sativa
  Clone ID: PAT_MRT4530_99640C.1.pep
HPCANAASFCSFVLSIPLAGVHLRDGEQVSGTSAFDVLHREKAAIRLLRSASRDCSLFVRDGSPSSPLACCANLRRRPQPRVVPAEQPVFLPPRYVFD

SEQ ID NO: 204567 - protein, 63 aa, Oryza sativa
  Clone ID: PAT_MRT4530_99641C.1.pep
LVPSDQQFVGLSDLVTVNSCLARDATGSITSLRKEEDTLFFRDPCFSAYVHPNRAPASRGDTT

SEQ ID NO: 204568 - protein, 568 aa, Oryza sativa
  Clone ID: PAT_MRT4530_99642C.1.pep
MGNTCVGPSSAADRHGFFHSVSLAVLWRPGGRAEPSQPPGYPPRESSHSSVTSSTAPERVTIADSDLSSSTPNKGGNKPKVRRVQSAGLLADSVLKRDSERLKDLYTLGKKLGQGQFGTTYQCVEKATGKVLACKSIAKRKLVSEEDVEDVRREIQIMHHLAGHPSVVSIVGAYEDAVAVHLVMELCAGGELFDRIVQRGHYSEKAAAQLARVIIGVVEACHSLGVMHRDLKPENFLFVNHKEDSPLKTIDFGLSIFFKPGENYSDVVGSPYYVAPEVLMKHYGREVDVWSAGVIIYILLSGVPPFWDESEQGIFEKVLKGDLDFSSDPWPAISDSAKDLVRKMLNRDPRKRLTAHEALCHPWVCVDGVAPDKPLDSAVLTRLKQFSAMNKLKKMALRVIAENLSEDEIAGLREMFKMLDTDNSGQITLEELKTGLRRVGANLKDSEITTLMEAADIDNSGSIDYGEFIAATMHLNKVEREDNLFAAFSYFDKDSSGYITQDELQKACEEFGIGDAHLEDIIKDIDQDNDGRIDYNEFVTMMQKGNNPLGKKGQGQLSFGLREALKLG

SEQ ID NO: 204569 - protein, 85 aa, Oryza sativa
  Clone ID: PAT_MRT4530_99643C.1.pep
ITVAVNFLMTTAVAQLFLATLCRMRAGIFFFFAAWLVAMTAFVYLLLPETKGLPIEQVRRLWAQHWFWRRFVDTASNGEQAKLDC

SEQ ID NO: 204570 - protein, 427 aa, Oryza sativa
  Clone ID: PAT_MRT4530_99644C.1.pep
MPSPSLRLAVVGAGAAGLVAARELRREGHSPVVFERAASVGGTWLYDAAPATSDPLAAGAAHSSLYASLRTNLPREVMGFLDFPFASSAAEAGGGGDTRRFPGHDEVLRYLEEFARRFDLYGLVRFGTEVVRVRRDGGGGGGRWAVTSRKIGEKGRREEEEEVYDAIVVCNGHYTEPRVAHIPGVEAWPGKQMHSHNYRVPEPFHDQVVIIIGASASAVDISRDLAGVAEEVHVADRSAPACTCKRQPGYDNMWLHSMVNALFSCYLYDFPFLEDDSAITVDDNCVDPLYKHVFPPEVAPHLSFIGLPWKVIPFPLFELQSKWVAGVLSGRVKLPSSEEMMEDVKAFHSKMEARGWPKRYAHNFSDCQFEYDDWLAEQCGHPPIEQWRKLMYAANSENKAARPESYRDEWDDDHLVAEAAEDFKKYL

SEQ ID NO: 204571 - protein, 30 aa, Oryza sativa
  Clone ID: PAT_MRT4530_99645C.1.pep
PKPKADLKPKPSKPGPKPKPPKPGPKPKPK

SEQ ID NO: 204572 - protein, 59 aa, Oryza sativa
  Clone ID: PAT_MRT4530_99646C.1.pep
ICLQNTCANKIVDELPSCEDFMIMFESVSPVESSSNVQCSKKKKKKKKKKKKQKKKKQQ

SEQ ID NO: 204573 - protein, 79 aa, Oryza sativa
  Clone ID: PAT_MRT4530_99647C.1.pep
MPTSPVTTTADGDGLAQLDIAIWRRPSLLHPELLRDDRALLALACPRVPPPLARVRNRGRRSQQWLRLKGANRPFNVKK

SEQ ID NO: 204574 - protein, 74 aa, Oryza sativa
  unsure (1)..(74): unsure at all Xaa locations
  Clone ID: PAT_MRT4530_99648C.1.pep
XSLSSKXQRRHPDLAPRXVVXVQEPRRXALRLPRRRRRLGVRRHRGGGGSRGDRREREAARSHCLLLIKYDFFR

SEQ ID NO: 204575 - protein, 744 aa, Oryza sativa
  Clone ID: PAT_MRT4530_99649C.1.pep
MVGALASASTGVMNSVIAKLSKLLEDEYAKLKGVQQQIAFLRDELRAMNATLRVLADVEEDLDPPVKRWRDKVRELTFDIDDCIDSFEVRVISHQQERGEGLIKGIIRKLKKLRARHEIANQIEALKAHVVEESKRHKRYDLLKPWSSSSATFTIDPRLPALYEEVDKLVGIKGPREHIIEWLTNKRSDRSREDLKVVSIVGCGGLGKTTLANQVFKEIRHQFDCSAFVSVSRNPDIKKILRDMLKEVNSLDNTQPWSPNDDERQLVNKLRDTLQDKRSGAGVLGRRPTGGEERRACAASGRRERSGARVSAGGRREAAAAGQQGELVLSGVSSTATTAIRSRGEGSPTAARAGGGVGGPELDDGSGAVGRARAGQRELDGDNGHVGATAGVVGRRGGRHVIHAEAAEVREGGGVAGAAKASLTGGREDDVASSSLLHRRQVADPGHSLLAPVGNRLSPPLSCAAGRSPTPPTASSHRTKQEDIDILGEIPALLVLRLTTSHGTNGRIFISSYNAFRCLKYFFLHINMCGTLLEFEEGSMPKLQHLMIKFNAHRWKCLNGASDLGIRHLSNLTMAEREACIQFEERSVNYEIEVNLGEVRDVGKVDQADVDDVRMRMRSGLFRTSDSVRSRPTGRQLSILGLAAAAPAGAEEKRLARHHLVSSSVQADGPTMGMVAAPRSRRRAAAAPTGAEEERRWLELKRSGRREWRIGGTTSRQWRSGGACGKRVIGAGAKINKMKLHWSS

SEQ ID NO: 204576 - protein, 1233 aa, Oryza sativa
  Clone ID: PAT_MRT4530_9964C.1.pep
MASSTGGWTTGSCSRRRHSIELLSGGGGDMLAAGASGEARSPWGFSRGGARVGGGLPNFKSAQPPSLPLSPPPVSPSSDFAIPPRLGPTELLDSAGDREKRDGRYDIWVQGHFRTFTRFLSPLILIGVVSIGKLPRLWSVFLQNLSANRLGAEVAKLSASPVGAEMDRLVRLHFDGSVVDESTGGSQFEGMSVRQLVFCAKPTFEELISRTKDELDWSDESVGIQGRYDVDRCACGGSKEELIEDDVQVGVEKQVEEDVDIGEERHRDVEDGEVEKKISDGGMDVNQADNENIDELEKRRLILFIREFLADEIYTREECEESMIFNGLNPNLLYADLDNEVDEFASDSDDDRPVGKMSDEESTMFEKIIGRNPEITQFEDLSNGSLAVADDSCKKERSSVEATGKHLQLTSRFIGNRLQAFVRAEPTLSPAAIVEAVEHIWHYRPTYGKAWHAKQVAMKVIWGDWDEAYHRLPILLNAIKSKNPSMYFLVESQGEKSRTVDGVHRRVFGRASWIFGLSVEAFKHSRPVLAIDGTFLIGKFRGALLTAIGIDAGLHLVPLVFALVERENTSNWEWFIDIVRRRLIGPNRKVCIISDSHVGILNSIKNEIPSHRLIHHRWCMRHFCANFYTARATQDQMKDLERICQINEKVLFISEIKRLMGFLGEGPKKWLTDNMAFKAKWARSFDTNGRRYSFMTSNMAESFNNVLRGIRKLPVTAIVAYTFSKCNSWFVDRHKDACAQIKSRHKWLEKINDILEEQKKRTLGQRTTQFDFPSTKLRGLNIEVPPRMCYEASNEAIQHTYSPRFEPYQDPSQWPSYDGELFVPDLSLKNDTRGRRRTKRFKNDMGKGMAQFPGLEDYYEERHRAPKIASRETLRVRGNTAHMSFDDRYIPYLRRAKLLAFITMAQWPMPLYNAAALTALVDRWRPETHTFHLPSGELTVTLEDVAMILALPMRGQAIAGDTASGNWRARVVQYLGVEPPEAPDGQRLTKTSGVPRSWLRANFSQCPPNADQATVQRYCRAYVLYIFGSVLFPDSGGDMASWMWLPLLADWDEAGTYSWGSGALEWLYRQLCDACRRSSADANLAGCVWLLQVWMWICLPVGRPTWRQHPAWPFEDEDRRPTVAFLWEVTPSPVVGPRNLAYYNYTNEMDYLQPEHVEWMPYESQEIAELGINAMCNIEWKMNTLRVDKRKNKKTTGWIAYHHTHIDRWDQFEANRVADSAMHNRQEFDAYLA

SEQ ID NO: 204577 - protein, 333 aa, Oryza sativa
  unsure (1)..(333): unsure at all Xaa locations
  Clone ID: PAT_MRT4530_99650C.1.pep
ASIHDVRAPARTAVAALMFTVHDPVVXALHVRRAAPRSPALPFRQWPPCRRGSAFAACVGRAVHGATPLISLNAFGHARPRLPVTLHHRRSSSNGDSRLLPTVIAAIVHASTAVFRRGYNMGICVSVCAFSCAFEMSDIRGFHRAVPSDAADGTAGGAPISAGAIAGTVCAVVVVVGLLAPLVYWLYRRKLKAAASPPLRPPAAAATPLVRAQEAGAAVGGQGDYTRRRAQVAVPARDGGDLCCGMCGSAYDIVRGGGELPETLECGHHFHRRCVRRWLRVNLACPTCNATHIQLCGDDDDGQATTPRHRLTASDYSGWDELSTGVGSSSCRF

SEQ ID NO: 204578 - protein, 340 aa, Oryza sativa
  Clone ID: PAT_MRT4530_99651C.1.pep
MVGALASASTGVMNSVIAKLSKLLEDEYAKLKGVQQQIAFLRDELRAMNATLRVLADVEEDLDPPVKRWRDKVRELTFDIDDCIDSFEVRVISHQQERGEGLIKGIIRKLKKLRARHEIANQIEALKAHVVEESKRHKRYDLLKPWSSSSATFTIDPRLPALYEEVDKLVGIKGPREHIIEWLTNKRSDRSREDLKVVSIVGCGGLGKTTLANQVFKEIRHQFDCSAFVSVSRNPDIKKILRDMLKEVNSLDNTQPWSPNDDERQLVNKLRDTLQDKRSGAGVLGRRPTGGEERRACAASGRRERSGARVSAGGRREAAAAGRQGELVLNGVSSTATTAM

SEQ ID NO: 204579 - protein, 83 aa, Oryza sativa
  Clone ID: PAT_MRT4530_99652C.1.pep
MCGGPIISGFIPASAAAAAADAAAKKHQGKRVTGDVLWPEMLRKGKAVAADEDYEDRFREFERGMSYNQAVGGGSHEEEDHND

SEQ ID NO: 204580 - protein, 83 aa, Oryza sativa
  Clone ID: PAT_MRT4530_99653C.1.pep
MPETKPIALVGEELDATPTWRGNCRNKISAILKGGGYQAGKVDGLKDKEFIQVWGIHNLHRRLLERGAAVELAGYGPEQKDVN

SEQ ID NO: 204581 - protein, 81 aa, Oryza sativa
  Clone ID: PAT_MRT4530_99654C.1.pep
PKGFFFGILFFPKEKGFWLQKPTFGAWGSFLFKGYPPCCFFIILSLGFFFFFWKKKKKKKKKKKKKKKTKKKKNKKKKKKQ

SEQ ID NO: 204582 - protein, 111 aa, Oryza sativa
  Clone ID: PAT_MRT4530_99655C.1.pep
MAGLQRSSETFRRSGSSGLVWDDRHLSGEIKPADGGGGGAAARVERSRSAGHGGYRAAGRVQPALDPPSPRVAVCGFCRFFGGSGKGGRSGGGAAAAVAGGKAKARRHSSS

SEQ ID NO: 204583 - protein, 61 aa, Oryza sativa
  unsure (1)..(61): unsure at all Xaa locations
  Clone ID: PAT_MRT4530_99656C.1.pep
KYGCXPPPPPPMTACLXISSTVKXRXPPAWPKPASMSQNQTRRICPPXPPPPCPPPXAYAP

SEQ ID NO: 204584 - protein, 116 aa, Oryza sativa
  unsure (1)..(116): unsure at all Xaa locations
  Clone ID: PAT_MRT4530_99657C.1.pep
MIVCKQKAMASNKVVFSALLLIIVSVLAATATMADHHKDQVVYSLFXXCDCXXXYPMYSLTHXXXLVKRHCVCHGAPGGAVDEQLRQDCCPQLAXXDDSWXXXSGLNHMXGGIFLX

SEQ ID NO: 204585 - protein, 852 aa, Oryza sativa
  Clone ID: PAT_MRT4530_99658C.1.pep
MGSSSASAAQHEEAAAAAAFVLGGVDMRMLAARTATGALARAGGGEAAAAAAAAARFEDCIRSLEAEKAKMEVFRRELPISVHLIADVIEWLKDEVEKQRLLRRRQVEAPAAAPPPEMFAPPATAKRKSAASAAAEGVKAEADANDKRSWMSSAQLWSCGSHTSTSTSNGGSVKKQQHKVSNAFMPLATLPAFAKSLEKADAAVPDLSLSSRVAMADAPACPAAPSATSSAVTDVAVAQRQQAVQRKARRCWSPELHRRFVAALQRLGGPQAATPKQIRELMKVDGLTNDEVKSHLQKYRLHTRRASDGGDGGGDHQTVGGRLWPLPPEQYTTSQHSTSQSGSPQGPLQLTVSSSHAVSVTAGDSCDGGEEEEEDGNPIHSGSEGKTSTISRAAAAAAAVWLSTSPPALFPTGETSPACLWRFLLRGKLLRRLRRCGCGSGARRAAAAAMREAVTVQVGGFANYVGSHFWNFQDELLGLADDPDADPVFKNAALDMDVLYRSGETHQGVATYCPRLVSVDSRGSLGSLSSSGNLDFDKFDNYGSAQEVVSDWSQIEEMNERLRFFVEECDHIQGIQFIVDDSGGFSSVAAQFLENIADDYTNTLVLLYCVRDPMTLGPSRRNQRESIMRALHDAVSFSKLSSFCNLMNMVTALDVAMPAPSLTDRDAMGNIEMKLHSLTPEISDEDEDPYSVESLVVHGALDRGGQRTSISQVKDSVCSVYEARETKPKFSHLSASLCPLPVPLPFPSIFRGNIGRHGEILSDHTEESQPKGSLDIESIPMAARLRSSSAVLPFIERRSGSLQKHGVARGAIGSLVLHDWGFGREEVEDMGEHLAKLLRPFHPEMDLTSDSD

SEQ ID NO: 204586 - protein, 491 aa, Oryza sativa
  Clone ID: PAT_MRT4530_99659C.1.pep
MAIKDEQQPLHILFFPFLAPGHLIPIADMAALFAARGVRCTILTTPVNAAVIRSAVDRANDSFRRNNGGLAIELTVVPFPDVGLPPGFESGTALTTQDDRDKFFLGIRLLHEPFDRYLSEHHVDAAVVDSFFRWAADAAAEHGVPRLGFLGTSVFARACTNSMLRNNPLETAPDDPDAVVPLPGLPHCVELRRSQMMDPKKRPDHWEKFQSLDAADQRSFGEVFNSFHELEPDYVEHYRTTLGRRVWLVGPVALANKDVAVRGTSELSPDADGYLRWLDAKPRGSVVYVSFGTLSSFSPAEMRELARGLDLSGKNFVWVINGADADASEWMPEGFAELIAPRGERGLTIRGWAPQMLILNHPAVGGFVTHCGWNSTLEAVTAGVPMVTWPRYADQFYNEKLITEVLEVGVGVGSMDFASKLENRRVIIGGEVVAGAIGRVMGDGEEGEAIRKKATELGVKARGALEKGGSSYDDVGILMDELMARRGSVNV

SEQ ID NO: 204587 - protein, 753 aa, Oryza sativa
  Clone ID: PAT_MRT4530_9965C.1.pep
MAGEGWVMGIIWHVLVLARNTIVDVWGGWSMEILLGASFLMQLVLTFSAGFRWRGDSPMLRNVIWLFYVSGDFVATLALGHLSVSGTSGKRRLVAFWAPFFLLHLGGPDSITAYELEDNQLSARYVLELVLRVTGAVYIVYKSISGSWALVPAAWLMLLVGVAKYTEKTLALHGANLANVRRSLERQQHRHHMGGGNHHSQQLAFATDDNDGALVMKAHALFHICKNSLVDSSVDIESTSPSTALFDLRWKELFRVMEIELSLMYDFLYTKATIIHTWHGYCIRALSPLATTVSLVLVELSNEGGRRHKQSDIVITRVLLVATFLLESASLLRALSSTWTGFLLHSKLQPGWIRHEVLCMRRWHRFHSVIMSLGWPAKVQAHRQWLGKMGQLNMLQLVITQKELERPAPKGGQFWDKEYQRCSNETMIPENVKKLVSELVSRQLKELRDYVKKVVAQEGADALSQDVNLLEMAVYLRKKRGQQALEKNNLLSDLRWSLGNELQLGILTWHIATNMFLLLSGKAAKAKGDEGPKVCAIMTLSNYMMYLLALRPYMLPGLVTRKLIELTCEELAQIWSEHQAAPAAVDDLESSSSPSFCNIRVFMRGKFSQWHNRWRVSTRLSHGRAEEEELARMLIERDNETALNKYLSRGIDVAQKLLDLVDLRKEIDMVQVILAVWVEMLFYASYQCSKESHAKQLSQGGELTTIVWLMAEHAGLFLVNKTRKGAEEANWRKRKANKKKEAGTSDATVNKLS

SEQ ID NO: 204588 - protein, 1378 aa, Oryza sativa
  Clone ID: PAT_MRT4530_99660C.1.pep
MAALPEATGALPQTEGEEVKDGVEVCVFDESPEVFSRAVHAISELTAGEPEPNFPDAEVERLASSITFLREWRHLSYEPKNVSFTCDARSAPSRVDTHKINLPQFSSASVPQYLAVAAHPPGSSYHKIGMPLIGRGIIQVWCLLAPSEEGHPHQSLVACNKYNPSNQPKRRGRPRKTITNSDHLEPSVKRPRGRPRKYPLPIAKLEDSSQNDTSQEFALIDPLVSSAVVSCDVAIACPMPTVNPVESTPRKGRGRPRKKPVEIKGLSGIKLTEDLSTALSPIALTCMEPKKKRGRPRKYPAPSNSKHLPGTDTELGNDSVCLLPGSIDCGLGPTENTGSGANITHAAVDAASPVPLSGQRGREQPEKEVIHIDNSMQSGQSDVGSMLPTYILPESSNKSNSTGPRRRGRPRKKPFPSTTSCVFAPGTETPKKGSTLTNSNNLMVLAKSNCDILANDIGRSSCAIENSVHLSVGTSRVATPAQGICLAKCKEESSAKKGRGRPRKQPISTERGCSKACRGEEQKTQTIPKSSDNAALVENCKKESCPGKGSVQDKKKSVSNERSSVVLSVEVQNMDGSSASTAYTSCCTPACNFENAERNQAVSVPSENSAQVIDELKDTEVARFKESTKDYHMICSAEKTLSRVPKDISLPRVVLCLAHNGKVAWDIKWKPPSANQSEHKSCLGFLAVLLGNGSLEVWEVPSPSMIQKIYSSSSKEGTDPRFLKLKPVFSSAKVALWKFSANLSFQGSKPFMCVTAESAPIRTVSWTPSVSKENMNAFVTAGEDGLKFWDLRDPYRHLWELTTARRAVISLQWLKDARGIVISLEDGTLKFVSLSRIANDVPVTGRPFVGMKTQGVSTYQLSEYLIWSVHASEIAGYAAYCVADGTAVCFELTPRFWEKEPGRNRVPYFLCGSLSEEGTTIKIGIALPNSPLSNVPLGTKRATKTCKDVAQLHVIEEGELLANSEYNCAINPSIRDGQQDEPDEGQETGAIVLAAPSMQENFGTSTSRGSESPENFEVFPPKAVALHRLRWNMNKGCTHILPSSGIGWFSSVGCVFTVVSFAGVPWFFEFIRSGNVTRSVSKPHGRNLFLQSLVEEGQNPSTSNGASNSQKSVEDKDLIDCLENGVNFWTDYSKVQYHPQSLYELHGSWTDFDKFDNYGSAQEVVSDWSQIEEMNERLRFFVEECDHIQIEMLLGNIEMKLHSLTPEISDEDEDPYSVESLVVHGALDRGGQRTSISQVKDSVCSVYEARETKPKFSHLSASLCPLPVPLPFPSIFRGNIGRHGEILSDHAEESQPKGSLDIESIPMAARLRSSSTVLPFIERRSGSLQKHGVARGAIGSLVLRDWGFGREEVDDMGEHLAKLLRPFHPEMDLTSDSD

SEQ ID NO: 204589 - protein, 261 aa, Oryza sativa
  Clone ID: PAT_MRT4530_99661C.1.pep
MERKENVNTFVTGGEDGLKFGDLRDPYRHLWELTTARRAVISLQWLKDARGIVISLEDGALKFVSLLRIANDVPVTGRPFVGTKTQGVSTYQLPEYLIWSVHASEITGYAAYCVADGTAVCFEGTTIKIGIALPNSPLSNVPLETKRATKTCKDVAQLHVIEEGKLLTNSECNCAINPSIRDGQQDEPDEGQETGAIVLAAPSMQENFGTSTSRGSESPENFEVFPPKAVAMHRLRWTMNKGSEKWLCYGGAAGIIRCQRI

SEQ ID NO: 204590 - protein, 566 aa, Oryza sativa
  Clone ID: PAT_MRT4530_99662C.1.pep
MREAVTVQVGGFANYVGSHFWNFQDELLGLADDPDADPVFKNAALDMDVLYRSGETHQGVATYCPRLVSVDSRVYILHVHGGIICRVSWLFEFIRSGNVTRSVSKPHGRNLFLQSLVEEGQNPSTSNGGSNSQKSVEYKDLIECLENGINFWTDYSKVHYHPQSLYELYGSWTDFDKFDNYGSAQEVVSDWSQIEEMNERLRFFVEECDHIQGIQFIVDDSGGFSSVAAQFLENIADDYTNTLVLLYCVRDPMTLGPSRRNQRESIMRALHDAVSFSKLSSFCNLMVPIGPPSLSRSCMSPYLYIQDEKPFHASAVCAAAIHSITVPFRLQRTGPSSDLAHSSGNLDIGELVHILSDQGRQNMVTALDVAMPAPSLTDRDAMGNIEMKLHSLTPEISDEDEDPYSVESLVVHGALDRGGQRTSISQVKDSVCSVYEARETKPKFSHLSASLCPLPVPLPFPSIFRGNIGRHGEILSDHTEESQPKGSLDIESIPMAARLRSSSAVLPFIERRSGSLQKHGVARGAIGSLVLHDWGFGREEVEDMGEHLAKLLRPFHPEMDLTSDSD

SEQ ID NO: 204591 - protein, 441 aa, Oryza sativa
  Clone ID: PAT_MRT4530_99663C.1.pep
MAGTERSRRRREVKLRKAWRKEAATAGPTSVNDVPDEVLELVLLRLGDSLALLRAAAACKRWRRLVADAGFLARFRSLHEPHVVGHYHVVDPTFAGALRGGNHVFVPERSPSPADALDRRRLSLDFLPEPDGDRAWWKLADTRGGLVLLYPKTWNASFPDMVVCEPLTRRHQGILRPQEMNSPYRICFGVFLIDGAAADETGGCISMSNFRVLSAVYEPETPYCGYWHGHGTPPRPRAYVFSSGVDGGWRESDSGSDVELPSLELINFVGRAGCSLYWGLDGKDAMLALHKTTAEFSLVTIPAIVGESYHPSTFRVIGGGDDGTMRVVRLIGDDLKIFTQLKGSGGEWVVEKLVRLPVATRGLPGHDVGLFHHYARIVTANERYILVTPRVATWLFSVEVETPVVEREHVRNKYAGAAYPYELPWPPVLQACIAGRRRSRR

SEQ ID NO: 204592 - protein, 1088 aa, Oryza sativa
  Clone ID: PAT_MRT4530_99664C.1.pep
MAAPPEATGAPPQTEGEEVKDGVEVCVFDESPEVFSRAVHAISELTTGEHEPNFPDAEVERLASSITFLREWRHFSYEPKNVSFTCDARSAPSRVDTHKINLPQFSSASVPQITHLDNGKAKTDSFCSSDFVIFAGGNVWALDWCPRLCDRPHSPINCEYLAVAAHPPGSSYHKIGMPLIGRGIIQVWCLLAPSEEGHPHQSLVACNKYNPSNQPKQRGRPRKTITTSDDHLEPSVKRPRGRPRKYPLPIAKVEDSSQNDRSQEFALIYPLVSPAVVSCDIAIAYPMPTVNPVESTPRKGRGRPRKKPVEIKGLSGIKLTEDLSTALSPIALTCMEPKKKRGRPRKYPAPSNSKHLPGTDTELGNDSVCQPGSIDFGLGPTENTGSGANITHAAVDAASPVPLSGQRGREQPEKEVIHIENSMQSGQSDIGSMLPTYILPESGNKSNSTGLRRRGRPRKKPFPSTTSCVFVPGTETPKKGSTLTNSNNLVVLAKSNCDILANDIGPSSCAIENSVHLSVGTSHAATPAQGICLAKCKEESSAKKGRGRPRKQPISTECGCSKACRGEEQKTQTIPKSSDNASLVENCKKESCPGKGRVQDKKKSVSNERSSVVLSVEAQNMDGSSASTAYTSCCTPACNFENAETNQAVSVPSENSAQVIDELKDTEVARFKESTKDDNMICSAEKTLSRVPKDISLPRVVLCLAHNGKVAWDVKWKPPSANQSEHKSCLGFLAVLLGNGSLEVIPLTVDWSPSHDMILAGCHDGTVALWKFSANLSFQGSKPFMCVTAESAPIRTVSWAPSVSKENVNTFVTAGEDGLKFWDLRDPYRHLWELTTAPRAVISLQWLKDARGVVISLEDGTLKFVSLSRIANDVPFTGRPFVGTKTQGVSTYQLSEYLIWSVHASEITGYAAYCVADGTAVCFELTPRFWEKEPGRNRVPYFLCGSLSEEGTTIKIGIALPNSPLSNVPLGTKRATKTCKDVAQLHVIEEGKLLTNSEYNGAINPSIRDGQQDEPDEGQETGAIVLAAPSMQENFDTSTSRGSESPENFEVFPPKAVALHRLRWNMNKGSEKWLCYGGAAGIIRCQRI

SEQ ID NO: 204593 - protein, 196 aa, Oryza sativa
  Clone ID: PAT_MRT4530_99665C.1.pep
MAAAAASSSSSSAAATPQGVTERRGIPAASFVEDVETYLRQAGLDVNSGLAFLQERLQQYKIVEMKLLAQQRDLQAKIPDIEKCLDIVATLQAKKALGEALTADFELSEGIYSRAKIEDTDSVCLWLGANVMLEYSCDEANALLKKNLENAKASLEVLVADLQFLRDQQTITQVTIARVFNWDVHQRRSKQAIKET

SEQ ID NO: 204594 - protein, 42 aa, Oryza sativa
  Clone ID: PAT_MRT4530_99666C.1.pep
MAISLFGARSFGFLEGFRRGFHGGDGDAVARKWWSGLADNFI

SEQ ID NO: 204595 - protein, 137 aa, Oryza sativa
  Clone ID: PAT_MRT4530_99667C.1.pep
MAPLMSGSGGGGAARRRPLRQPPVVDDDDVGCSCPKQRLLRSLLSSLVSRARGALGGRAVSRPKSSAPPSSSASTTTTAAAAFTSTSTTGASATTGDSSKESWGPATYAATNTHTLYEVEDEVRRQRRKDMRRRRRR

SEQ ID NO: 204596 - protein, 85 aa, Oryza sativa
  Clone ID: PAT_MRT4530_99668C.1.pep
ILTVYAESERNRECFLFKWGNLFSLLFFASRKTHEATIEEIPSKCLLLIPGIPTTMIEDSVESNMSTGVRSAKLLTRHTIYIQVP

SEQ ID NO: 204597 - protein, 104 aa, Oryza sativa
  unsure (1)..(104): unsure at all Xaa locations
  Clone ID: PAT_MRT4530_99669C.1.pep
QDLNPEVPWPPHPRMVKSFQESHPKPLEQSLLLLLSEXYRRQGLLSEPGYFRQGLSEEGXFGEQQQQPGNTPLKPTQAXKYAAHLPXMCRFEPQQCSIFAAGQY

SEQ ID NO: 204598 - protein, 111 aa, Oryza sativa
  Clone ID: PAT_MRT4530_9966C.1.pep
MAMPSVGIAALSSTSIATPPRPRRQGPVVDVLSSAGITTSPLSRWSCLVPPLQGALTIREEIELMRNVYKLLGGLHAFNEFNAGNLDELIILKSIARNHIFIAIVEIIIAT

SEQ ID NO: 204599 - protein, 108 aa, Oryza sativa
  unsure (1)..(108): unsure at all Xaa locations
  Clone ID: PAT_MRT4530_99670C.1.pep
KFRVEPRGRPRGRANRRNVKNFQENNAKPLEPSLLVVVVEEFRRQGLLFEPGEFRQGLFEEGLLGQQQQQXPGITGVRLTRARQYAAQLPSMCRVEPQQCSIFAAGQY

SEQ ID NO: 204600 - protein, 233 aa, Oryza sativa
  Clone ID: PAT_MRT4530_99671C.1.pep
MSSSNGTTTYLPGGEAAGGGGGGNSGCCSTTTLFGALAASFALSFFLITIFICLRALRVARRRRDRPLVMEQEQRRPTPPRFGLDAAAIARLPSFPYVRARDDGEVSDSASSSSVECAVCLSAVDEGETVRQLPACGHVFHRECIDMWLSSRASCPVCRGKAAPADELADAIVARIAVTPDLVGPRVSMSVVVPVEMLKGEMVGASSTSRAASAPPEQLDARAPGPETDLESK

SEQ ID NO: 204601 - protein, 131 aa, Oryza sativa
  Clone ID: PAT_MRT4530_99672C.1.pep
MGGAGFAHRLSFPLSSPLPLVAIVAFGSSTTSPPTALPKGGKGNTDVGSALAVNCFSRPSHATPPAPVPATDGWSCHTAACNCKVGDTAHNRTRRGLVMVSLVGGGRVRLELENLLRCEMPPSRPARYPTP

SEQ ID NO: 204602 - protein, 133 aa, Oryza sativa
  Clone ID: PAT_MRT4530_99673C.1.pep
MSQRQDKGVVAAQQQQGGATGPKWQNSGNGTAKATMDRSGGGDRAAVARSSGGPRAATGPSGVEGGGSAATGPWEHGSVTTRPWKAIPRLRGHLTVQPKKGDFRGALRVDTCENRFLHIDENPSTKIDDFHGP

SEQ ID NO: 204603 - protein, 335 aa, Oryza sativa
  Clone ID: PAT_MRT4530_99674C.1.pep
MASKIRPMWRRGWGWPCHCDDRGGDGVVDRHTGKEEGPIEEAQVRRMDQARGGLWAKPRAGQGRGKRCDVGGGGGAASRRTDKAVGAAGVGASETEEEAARAMTMGSFRQASTDGNRLLGFSWLFLTQQRKRRGLVTTEAAGARSAAEREDERVERWRGRREAREEAKTREGKEGVPFYRLRRGAGHGRGGASTENGGRRPWKVVGKGTAVPAAVAVAASASTGTNGPHLMAEFIGNAVPNGTQSFINVGHSAALASVGGKVACFWQEQFSTVHMLSRSYEGEPIVRLGGNGGYEFRYSTSLAGSGHMSGLGAQGGTPFLKSGIAGSEKWQGAAQ

SEQ ID NO: 204604 - protein, 50 aa, Oryza sativa
  Clone ID: PAT_MRT4530_99675C.1.pep
DHQRCSYLIRDAIAQAKLGVPPPVDARLQDVKHTVSEDDAQSSPRGAPEP

SEQ ID NO: 204605 - protein, 107 aa, Oryza sativa
  Clone ID: PAT_MRT4530_99676C.1.pep
MWAQVHMSVTSPAWAVLQTIPIGLFPLLLAYFSLFRIKFLCFSPELGFGTENRCCLQEPFVNIPEDRIREALKVVLDVANHPVLIHCKRGKNLKLQGKTIMALQALD

SEQ ID NO: 204606 - protein, 492 aa, Oryza sativa
  Clone ID: PAT_MRT4530_99677C.1.pep
MGRRMTCQAQVEVSPYSDSGLVDERTNDASEQRPPPSEPRPRAAMLGLRGARAAQLPYASAAVAPTPTPSFSGFARRLPLLASAALSPLPPSFSFSSASAVRRDRDPPMRPVSGALSREGKELLVQHLLVGEQDVRLLVDLEKNIITGGADLSDLAVEYSLCPSKENGGMLGWVRRGQMVPEFEEAAFGAPLNKVVREQCVVEDIPPEELHAKMQDPNFLEEAQLIDVREPDEVDKASLEGFKVLPLRQFGTWGPVMTDEFDPQKDTYVLAYVQQLESSKLKLAQLEQELQKARQQGIFISSSGDQTHAMSGNGALTFDLEYTRWLEEQNKQINELRTAVNAHASDSDLRLIVDGIMAHYDEVFKVKGVAAKADVFHILSGMWKTPAERCFLWLGGFRPSELLKLLANHLEPLTEQQLLGLNNLQESSQQAEDALSQGMEALQQSLADTLAGSLGSSGSSGNVANYMGQMAMAMGKLGTLENFLCQASIFTF

SEQ ID NO: 204607 - protein, 287 aa, Oryza sativa
  Clone ID: PAT_MRT4530_99678C.1.pep
MLQTYSSDRWHYDACTVTPAMPKRKCAVKEQHCFGLLRYMYRLSSSTHSWVMARMACTWIDHASFSSAMPRRRQTPTMYLATGHYSRFQVVVEIYDRCAELGRYINMCQLVGIVNTLSRLITRKKFNIPRNFRIQEPIYQFQQYAVAYSPQILVMSHIAIVQEPRLDSLEQSAKPVHETNHIAQIEYTRREEGTHRPNAKRTPTAQMQRSNEPNQVAQMRYWSTIEYRNKSTSTPLKLLLMKNNRRLGMTCHLIDIGLKTTQLFHVGDDVYNSTLYSAPRTRTMILE

SEQ ID NO: 204608 - protein, 1509 aa, Oryza sativa
  Clone ID: PAT_MRT4530_99679C.1.pep
MADPQHVQEEAAGAEAVHAHAARHDGAVVMEILSRSLQSMPASPDVSAYFSGASSRRPSAADEVDDEEALRWAALERLPSFDRLRTGLMRADADSSGVGVGAVGRGRRWYAHREVDVRTLELAQRQAFVERVFHVAEEDNERFLKKLRARIDRAGIQMPTVEVRFRNVNVQAECHVGTRALPTLANVSRDVGESLLGLVGLNFAKRKALHILKDVSGIVRPSRMTLLLGPPSSGKTTLLLALAGKLDPTLETSGEVTYNGYGLDEFVPQKTAAYISQHDVHAGEMTVKETLDFSAKCQGVGQRYELLKELAKKERQLGIYPDPEVDLFMKATSVEGSTLQTDYILRILGLDMCADVIVGDELRRGISGGQKKRLTTAEMLVGPTKVLFMDEISTGLDSSTTFQIIRCIQQIVHMGEATVLVSLLQPAPEIFELFDDVMLLSEGQIVYQGPREHVLEFFERCGFRCPERKGVADFLQEVTSKKDQEQYWIQSEKPYRYVSVPEFVAKFKKFHMGKSLKKQLSVPFNKGKIHKSALVFSKQSVSTLELLKTSCSKEWLLMKRNSFVYIFKTVQGILVALIASTVFLRTQLNTRDEDDGQIYIGALIFVMITNMFSGFADLSLTLARLPVFYKHRDFLFYRPWTFALPNVLVRIPSSLFESIIWVAITYYTMGFAPEASRFFKHLLVVFMLQQMAAGLFRVTAGLCRTVVVTNTAGSLAVLIMFVLGGFILPKDAIPKWWVWAYWCSPLTYAYIAFSSNEMHSPRWMDKFVPDGKRLGVAVLENSGVFTNKEWYWIATGALLGFTILFNVLFSLSLMYLNPVGKPQSILPEETDSQENIQEGKNKAHIKQIITVETPEPVSPNSIITLDKVIQQLRGYSANTSDRSHSYINAAGRTAPGRGMVLPFEPLYMSFNEINYYVDMPLEMKSQGVTADKLQLLSGISGAFRPGVLTALMGVSGAGKTTLMDVLSGRKTGGYIEGEIYISGYPKNQATFARISGYCEQNDIHSPQITVRESLLFSAFLRLPKEVNDQEKKIFVDEVMELVELTGLKDAIVGLPGVNGLSTEQRKRLTIAVELVANPSIIFMDEPTSGLDARAAAIVMRTVRNTVNTGRTVVCTIHQPSIDIFEAFDELLLLKRGGQVIYSGPLGTNSHKVVEYFEAIPGVPKIEENRNPATWMLDVSSAASEVRLEIDFAEYYRSSTMHQRTKALVKELSNPPPGSDDLYFPSQYSQSTFNQFKLCLWKQWWTYWRSPDYNLVRIFFALFTALMLGTIFWRVGHKMESSKDLLVIIGSMYAAVLFVGFENSVTVQPVVAVERTVFYRERAAGMYSAIPYALAQVVVEIPYVFVETVIYTLIVYPMMSFQWTPAKFFWFFYVSFFTFLYFTYYGMMNVSVSPNLQVASILGAAFYTLFNLFSGFFIPRPKIPKWWVWYYWLCPVAWTVYGLIVSQYGDVEDFITVPGQSDQQVRPFIKDYFGYDPDFMGVVAAVLAGFTVFFAFTYAYSIRTLNFQQR

SEQ ID NO: 204609 - protein, 77 aa, Oryza sativa
  Clone ID: PAT_MRT4530_9967C.1.pep
AFTILQVVRRGGGAKLVSSCRGLDISRPEMNDYHQICRTKGYQFLLKKKFFIKKKKKNCGLARGEKIKKNTKYIYLS

SEQ ID NO: 204610 - protein, 112 aa, Oryza sativa
  Clone ID: PAT_MRT4530_99680C.1.pep
MDPVHRFPAVNSPSSSWSSCASSRQRCGGWRPELKMKGGGSSSATTAVMMMVVLLVAAASDAAAAPRRLLGADGGGGGGSPALVSESKAASTCTYDQNTHSNGPPCPSPPHN

SEQ ID NO: 204611 - protein, 1828 aa, Oryza sativa
  unsure (1)..(1828): unsure at all Xaa locations
  Clone ID: PAT_MRT4530_99681C.1.pep
MAKTSTAAGGNETTQEERIAGAVVEETGKTPMNDVELAELVQAQGAVMVSKGQYEELQKELQRLQTLHNQTVGAGGSSDQCAIPGAREKQSDQAKGDAQGENKEGESIKATQAQDLPRTQAPSQVQNPSQAQIPILTQNTPQAQITIPTQNLAQTLIPSQNQIPIQTHISFQPHIPIQTQNPNQVQYPQTQLHQTHPVLPNQIQIPQPDILQSNIPRTQLPQNDTPQIQVPQTQIPQIQTSLPNFTHTQSTNTQAAQNHHQVPQGFSLFHMQQPEMMFEQGYIPQMANHIQYAGQIPNQAFQFQPTQPYFQPTRAIDTKNPLSQNLQMAPWPINFKLSNITKYKGDTDPNEYLRVYETAVEAAGGDDTTKAKILPTMLEGVALSWYTTIPPMTIYSWEHMRDTFRAGFIGAYEEPKEADDLYAMKQLPGETLRSFIVKFSRVRCQIRHVDDEMLIAAAKRALLPGPLRFDLARNRPKTAKDLFERMESFARGEEDELRVQEEEAVLLGKKXQSKNKQISQGEEQKGENTGKPWKKFKXGSNNEREKRKHQWDNTRRGRNNWGQSGKGRGQWWNSGRGRGRWWNNERGKGRENKPDQTKFCQTHGPGGHSTEECYXKYEGARDQQGQNAIEAPQVMKIEAIEEVPKRVINAITGGSSLGVESKRQRKAYVRQKMQIPEDRLTNAGVPLQGFGGQQVHAIEKISLQVVFGKGTNVRKEEIVFDVVDMPYQYNAILGRSTINIFEAIIHHNYICMKLPGPRGVITVRGEQLAARKYELQGTPSVKGVHVVDQKQGEYIKIQKPIPEGKTKKVQLDEHDSGKFILIGENLEKHIEEEILKVVKENMAVFAWSPDELQGVDRSLIEHNLAIKSRYKPKKQKLRRMSTDRQQAAKIELEKLLKAKVIREVMHPEWLANPVLVKKANGKWRMCIDFTDLNKACPKDDFPLPRIDQLVDATAGCELMSFLDAYSGYHQVFMVKEDEEKTSFITPFGTYCFIRMPFGLKNAGATFARLIGKVLAKQLGRNVEAYVDDIVVKSKQAFTHGKDLQETFENLRKCSVKLNPEKCVFGVRAGKLLGFLVSKRGIEANPDKIAAIHQMEPPKNTRQVQRLTGRMASLSRFLSKSAEKGLPFFKTLRGANTFEWTAECQQAFDDLKKYLHEMPTLASPPKGQPLLMYVAATPATVSAVLVQEEENRQVPVYFVSEALQGPKTRYSEVEKLIYAIVMASRKLRHYFLSHDITIPSAYPIGEVLTNKEVAGRIAKWAMELLPFDLKYISRTAIKSQVLADFVAEWTPNEVEQQEEVEKPWIVFSDGACNAAGAGAAAVVKTPMKQTLKYSVHIAFPSTNNTAEYEGVLLAMRKARALGARRLIVKTDSKLVAGHFSKSFEAKEETMAKYLEEARLNEKHFLGITVKAITREENGEADELAKAAATGQPLENSFFDVFTQPSYEKREVANIHGEIDWRESILKYLVSEQLPEKEEEARRIQLMSRKYKVIEGQLYKSGVTTPLLKCVTREEGMKMVVEIHEGLCGAHQAPRSVASKKYIKTCKACQKFGATSKAPPRELQPIPPVWPIPPRAKGDLRFVIVAIEYFTRWIEAEAVARITSASVQRFVWKNIICRFGIPKDNGKRSESGKFKDMCKCLNLQINFASVGHPRTNGAVERANEKIVEAIKKRLEGSAKGKWPEDLLSILWALRTTVVRSTGMTPFRLIYGDEAMTPSEVGANSPRIVFDQKDEEGREITLEMLHEIRVEALDKMAKNTEETKSYYNKKVKIRQIEEGDLALKKTLNEVAVGRTIHSKKKVKTGAYKLAHLDGEELKHTWNAVSLKKFYV

SEQ ID NO: 204612 - protein, 112 aa, Oryza sativa
  unsure (1)..(112): unsure at all Xaa locations
  Clone ID: PAT_MRT4530_99682C.1.pep
TEALTEERCGGGGLMSYCLIASKQMGLLSLPVXIRKEHPQHGGHXRMDCVELVMMDWLGYKGXMPLNMTLHHASLWFXCRHLNSEKKAGDELRPIANVAGMLKSAHLPCSWR

SEQ ID NO: 204613 - protein, 286 aa, Oryza sativa
  Clone ID: PAT_MRT4530_99683C.1.pep
MAKYLEEARLNEKHFLGITVKTITREENGEADELAKAAATGQPLENSFFDVLIQPSYEKREVANIHGEIDWRESILKYLVSEQLPEKEEEARRIQLMSRKYKVIEGQLYKSGVTTPLLKCVTREEGMKMVVEIHEGLCGAHQAPRSVASKNNSCPTTGMTPFRLIYGDEAMTPSEVGANSPRIVFDQKDEEGREITLEMLHEIRVEALDKMAKNTEETKSYYNKKVKIRQIEEGDLALKKTLNEVAVGRTIHSKKKVKTGAYKLAHLDGEELKHTWNAVSLKKFYV

SEQ ID NO: 204614 - protein, 1501 aa, Oryza sativa
  unsure (1)..(1501): unsure at all Xaa locations
  Clone ID: PAT_MRT4530_99684C.1.pep
MEKPSPPPPGKSRPDCVNSSNPYHECSDYCLRQIVKSREDNHRWSRVHPHCINASNPYHACSNFCFRRIIHAKPSPSGLERPVQEPPASEAVPAQADDDDDAQTDDDDEEDAAADDDDGYLKMTVTENQKLVFELRDRREKGVFPSIPNLVRDLGSRQKSVPIRYTDTFASAAAALEREWEEMTGQSAQTGVEKAMPGRKTAGPTREETRENPPSEVELAEMVQAQGAIMVNKEQYEELQKEPQRLQALHDQTMGAGGSGREAETLNTDKGQPNQVGKEIQRNVGNVEKENPQVGNAPVDKPTQEVPQNQLPTQIPQSVQNQLPTQIPQSVQNQLPAQIPQSVQNQLPTQIPQSVQNRLSTQNPQSTQTLQTTQNLPSIQTQQLTQPQFYNQTHFPQNQIPQTQANIPQMQIPHIQIPQLSNITKYKGDTDPNEYLRVYETAVEAAGGDDTTKAKILPTMLEGVALSWYTTIPPMSIYSWEHMRDTFRAGFIGVYEEPKKADDLYALKQMPGETLRSFMVKFSRIRCQIRQVDDEMLIASAKRALLPGPLRFDLARNRPKTAKDLFERMESFAREEEDKLRVQAEEAALLGKKQTKNKQVSLGEKQKAENTAKPWKKFKNDYKQDQKKQVNFIGDDSNNXEKEKGRDNWGQSARGRGQWWXSTEECYXKFCQIHGPGGHSTQECRHMAYLVEKHKQSKKLPKRVINAITGGSSLGIESKRQRKAYVRQVNHVGTSYQSNPPVHSKTVISFGPEDAEGILFPHQDPLVISVEIAQCEVQRVLVDGGSSADVLFYDAFKKMQIPEDRLTSAGVPLQGFGGQQVHAIGKIRLQIVFGKGNNARKEEIVFDVVDMPYQYNAILGRSAINIFEAIIHHNYICMKLPGPRGVITVRGENLEKHVKEEILKVVKSNMDVFAWSPEELKGVDRSLIEHNLAIKQEYKPKNQKLRRMSTDRQQAAKVELEKLLKAKVIREVMHPEWLANPVLVKKANGKWRMCIDFTNLNKACPKDDFPLPRIDQLVDATAGCELMSFLDAYSGATFARLIGKVLAKQLGRNVEAYVDDIVVKSKQALTHGKDLQETFENLRKYSVKLNPENKSTKGQPLLVYVAATPVTVSAVLVQEKENKQMPVYFVSEALQGPKTRYTEVEKLIYAIVMASRKLRHYFLSHDITIPSAYPIGEVFKNKEVAGMIAKWAMELLPFDLKYNSRTAIKSQVLADFLAEWTPNEVDKKEEDGKPWIVYSDGACNATGAGVAAVVKTPMKQTLKYSAKLVFPSTNNTAEYEGVLLAMRKARALGARRLIIKTHSKLVAGITVKAITREENGEADELAKAAATGQPLENSFFDMLIQPSYEKREVENIQGEIDWREPILKYLVREQLPEKEEETRRIRLMSRKYKVIEGEEGREITLEMLDEIRVEALDKMAQSTKGTKSYYEKRVKIRQIEEGDLVLKKTLNEVAIGKLESKWEGPFIVKRKLETGAYKLAHLDGEELKHTWNAISLKKFYV

SEQ ID NO: 204615 - protein, 99 aa, Oryza sativa
  Clone ID: PAT_MRT4530_99685C.1.pep
IKPSLSSSSWWWWSSSSSSRASHGDGDGGQLWSHHAASSPDKLFCTPGKLEVVPAEDLTVLMPGQRYPTFLAQPAPLLPWPREGVRWPPHGHRHCFVPP

SEQ ID NO: 204616 - protein, 1934 aa, Oryza sativa
  unsure (1)..(1934): unsure at all Xaa locations
  Clone ID: PAT_MRT4530_99686C.1.pep
MPGGNTVGPTREETRENPPSEVELAEMVQAQGAVMVNKEQYEELQRELQRLQALHDQTMGAGGSGREAETLNTDEGQPNQVGKEIQRNVGNVEKENPQVGNAPVDKSTQEVPQNQLPTQIPQSVQNQLSTQIPQSTQTLQTTQNLPSIQTQQLIQPQFYNQTHFPQNQIPQTQTNIPQMQIPHIQIPQVQTRQANIPYMQASHDQTMQNPNQQHQAFPFFHSQQLETTQEQYYIPQMPNPNITQFATQFPNHIGQFAXAQSYFQPARAIDTQSPLSQNLQMAPWPIHFKLSNITKYKGDTDPNEYLRVYETAVEAAGGDDTTKAKILPTMLEGVALSWYTTIPPMTIYSWEHMRDTFRAGFIGVYEEPKEADNLYAMKQMPGETLRSFMVKFSRIRCQIRQVDEEMLIASAKRALLPGPLRFDLARNRPKTAKDLFERMESFARGEEDELRVQAEEAALLGKKQTKNKQVSLGEEQKAENTAKPWKXKFKNDYKQDQKKQVNFIGDDSNNGEGKGKRQWENTRGGRNNWGQSARGRGQWWNSGRGRGQWWNNDRSGGKXYQLDHGKFCKAHGLGGHSTEECYSKFCEIHGLGGHSTEECRHMAXLVEKHVSQYENKYEGARDQRGQNAIEAPQVMKIEAIEEAPKRVINAITGCSSLXIESKRQRKAYVRQVNHVGTSYQSNPPVHSKTIISFGPEDAEGILFPHQDPLVISVEIAQCEVQRVLVDGGSSADVLFYDVFKKIQIPEDRLTSAGVPLQGFGGQQVHAIGKIPLQVVFGKGNNARKEEIVFDVVDMPYQYNAILGRSTINIFEAIIHHNYICMKLPGPRGVITVXGGQLAARKFELXGTPNVKGVHVVDQKHGEYSKLQKPVPEGKTRNVQLDDDDPGKYILLGENLEKHVEEEILKVGKSNMDVFAWSPEELKGVDRSLIEHNLAIKXGYKPKKQKLRRMSTDRQQATKVELEKLLKAKVIREVMHPEWLANPVLVKKANGKWRMCIDFTDLNKACPKDDFPLPRIDQLVDATASCELMSFLDAYSGYHQVFMMKEDEEKTSFITPFGTYCFIRMPFGLKNAGATFARLIGKVLAKQLGRNVEAYVDDIVVKSKQAFSHGKDLQETFENLRKYSVKLNPEKCVFGVGAGKLLGFLVSKRGIEANPDKIAAIHQMQPPKNTREMQRLTGRMASLSRFLSKSAEKGLPFFKTLRGANSFEWTAECQKAFDDLKTYLQNMPTLASPQKGQPLLMYVAATPVTVSAVLVQEKENKQMPVYFVSEALQGPKTRYTEVEKLIYAIVMASRKLRHYFLSYDITILLAYPIGEVLTNKEIAGRIAKWAMELLPFDLKYTSRTAIKSQVLADFLAEWTPNEVDQKEEDEKPWIVYSDGACNATGAGAAAVVKTPMKQTLKYSTKLVFPSTNNTTEYEGVLLAMRKARALGARRLIIKTDSKLVAGHFSKTFEAKEETMTKYLEEARLNEKHFLGITVKAITREXNGEADELAKAAATSQPLENSFFDVLIQPSYEKREVANIQGEIDWREPILKYLVSEQLPEKEEEARRIQLMSRKYKVIEGQLYKSGVTAPLLKCVTREEGMRMVVEIHEGLSGAHQAPRSVASKVIRQGVYWPTIIKDKEKYIKTCKACQKFGATSKAPPRELQPIPPVRLFYRWGLDIVGPLPRAKGDLRFVIVAIEYFSRWIEAEAVARITSASVQKFVWKNIICRFGIPKEIVCDNGKQFESGKFKDMCKGLNLQINFASVGHPQTNGAVERANGKIVEAIKKRLEGSTKGKWPEDLLSVLWALRTTVVRSTGMTPFRLVYGDEAMTPSEVGANSPRVVFDQKDEEGREITLEMLDEIRVEALEKMAQSTEGTKSYYNKKVKIRQIEEGDLVLKKTLNEVAVEKLESKWEGPFIVKRKLETGAYKLAHLDGEELKHTWNAISLKKFYV

SEQ ID NO: 204617 - protein, 1723 aa, Oryza sativa
  unsure (1)..(1723): unsure at all Xaa locations
  Clone ID: PAT_MRT4530_99687C.1.pep
NPRVLIPHFQIPQVQTRQANIPYIQASHDQPMQNPNQQHQNFPSFHSQQPENARSKHXQFASQFLNQMVQFAPTQSHFQPTRAIDTQNPLSXNLQMAPWPAHFKLSNITKYKGDIDPNEYLRVYETAVEAAGGDDTTKAKILPTMLEGVALSWYTTIPPMSIYLWEHVRDTLXEGFIGAYEEPKEADDLYAMKQMPGETLRSFMVKFSRVRYQIRXVDDEMLIASAKRALLPGPLCFDLARNRPKTVKDLQGXESFVRGEEDELRVQAEEAALLGKXQTKNKQVSLGEEQKAENTAKPWKXFDYKXDQKKQVNFIGDGSNNGEGKGKRQXENTRGGRNNWGQSGRGRGQWWNSGRGRGXWLNNDRSGGKEYQPNHSKFCQAHGLGGHSTEECYSKFCQIHGLGGHSTEECRHMAYLVEKHVGRYENKHXGGXDQRGKNAIEAPQVMKIEEIEEAPKRVINAITGGSSLGIESKRQRKAYVRQVNHVGTSYQSNPPVHSKTVISFGPEDAEGILFPHQDPLVISVEIVQCEVQRVLVDGGSSADVLFYDAFKKMQIPEDRLTNAGVPLQGFGGQQVHAIGKIPLQVVFGKGNNARKEKIVFDVVGTPYQYNAILGRSAINIFEAIIHHNYICMKLPGPRGVITVRGGQLAARKFELQGTPNVKGVHAVDQKHGEYSKLQEPVPEGKTRKVXLDDDDPRKYILLGENLEKHVEEEILKVVKSNMDVFAWSPEELXGVDRSLIEHNLAIKQGYKPKKQKLRRMSTDRQQAAKVELEKLLKAKVIREVMHPEWLANPVLVKKANGKWRMCIDFTDLNKACPKDDFPLPRIDXLVDATAGCELMGFLDAYSGYHXSFYDEDEEKTSFITPFGIYCFIRMPFGLKNAGATFARLIGKVLAKQLGRNVEAYVDDIVVKSKQAFTHGKDLQETFENLRKYSVKLNPKKCVFGVRAGKLLGFLVSKRGIEANPDKIAAIHQMEPPKNTREMQRLTGRMASLSRFLSKSEEQGLPFFKTLRGANTFEWTAEYQKAFDDLKMXLQNMPTLASPQKGQPLLTYVAATPGTVSAALVQEKENKQMLVYFVLEALQGPKTRYTEVEMLIYAIVMASRKLRHYLISDDITILSAYPIGEVLTNKEVARRIAKWAMELLPFDLKYTSRTAIKSQVLADFXAEWTPNEVEEKEEDEKLWIIYSDGACNATGVGAAVVVKTPMKQTLKYFAKLVFPSTNNTAEYEGVLLAMRKARALGARRLIIKTDSKLVAGHLSKTFKAKEETMAKYLEEARLNEKHFLGITVKTITREENGEADELAKAAATGQPLENSFFDVLIQPSYEKREVANIHGEIDWRESILKYLVSEQLPEKEEEARRIQLMSRKYKVIEGQLYKSGVTTPLLKCVTREEGMKMVVEIHEGLCGAHQAPRSVASKVIRQXVYWPTIIKDIEKYIKTCKACQKFGATSKAPPRELQPIPPVWPIPPRAKGDLRFVIVAIEYFTRWIEAEAVARITSASVQRFVWKNIICRFGIPKDNGKRSESGKFKDMCKCLNLQINFASVGHPRTNGAVERANEKIVEAIKKRLEGSAKGKWPEDLLSILWALRTTVVRSTGMTPFRLIYGDEAMTPSEVGANSPRIVFDQKDEEGREITLEMLHEIRVEALDKMAKNTEETKSYYNKKVKIRQIEEGDLALKKTLNEVAVGRTIHSKKKVKTGAYKLAHLDGEELKHTWNAVSLKKFYV

SEQ ID NO: 204618 - protein, 142 aa, Oryza sativa
  unsure (1)..(142): unsure at all Xaa locations
  Clone ID: PAT_MRT4530_99688C.1.pep
SERHSPGTAVLGPESIGVARPDQHSRPCRASPRAAPQAKARHTSSQAMPWRPEGTGGPCWPSVLRXQPKHGTAVEPGRHGHDPSRAMPCLGRAKITGPWAGHRASEHMAKRGRERGVETKQDLSQAKQQHKKPIHICVHRYM

SEQ ID NO: 204619 - protein, 209 aa, Oryza sativa
  Clone ID: PAT_MRT4530_99689C.1.pep
MEKPSPPPPGKSRPDCVNSSNPYHECSDYCLRQIVKSREDNHRWSRVHPHCINASNPYHACSNFCFRRIIHAKPSPSGLERPVQEPHASEAVHAQADDDDDAQTDDDDEEDAAADDDDGYLKMTVTENQKLVFELRVSYRISRKGWSNWKRLFAMEKTHGGGKDPRSRRRPMVVEKTLDHEEGDLDNKDAKRIFLRTTQPLHLAGTKRL

SEQ ID NO: 204620 - protein, 77 aa, Oryza sativa
  Clone ID: PAT_MRT4530_9968C.1.pep
GGNHGNLKNGRPKTPQEKGNSSPNGRRTRNGNPHKRGHRTKSLNCKREDMSKQQQHTEHTQQMHQKNKPGGRAPFTP

SEQ ID NO: 204621 - protein, 82 aa, Oryza sativa
  Clone ID: PAT_MRT4530_99690C.1.pep
LARALARLVNECVAGPDATRELASPLVEDAVALFVHSVALLAATGFVSDGCDLSYKVNELAPVYANKGRPLHNPRETYRYFD

SEQ ID NO: 204622 - protein, 104 aa, Oryza sativa
  unsure (1)..(104): unsure at all Xaa locations
  Clone ID: PAT_MRT4530_99691C.1.pep
LESTKLNLREYEKLLLEVCGESERVRGLYSLPMMVVTVGMIGNTLQSSLGANLDRSLKALHPTAMRXVWPNLRLAQPAHFLAGGLPDFFSPQTCEFWAYWVFLN

SEQ ID NO: 204623 - protein, 206 aa, Oryza sativa
  Clone ID: PAT_MRT4530_99692C.1.pep
AIAIEKIAKKKKPPPPEDPPSDEADAVAAVAVDADGERERERERERGRDGRLCRTPPSLRRAGETGRRAAAATAASVGKGAAAASVGEAAAAAAALRRRHRRSPLSPPPQPAGEKGGRREGKRRRWWERRPAGGRGRGGRWGKGAAPPEGGEGKRRRWGEGEAASGVGEATSGLGGRGGGVGKVRVRVRVLIRPWADRHGTEIRLF

SEQ ID NO: 204624 - protein, 48 aa, Oryza sativa
  Clone ID: PAT_MRT4530_99693C.1.pep
PNNRPLNNLPRQKAIQYQKNDPGKTLKKKTLRMKASKYHYIPMYNLTR

SEQ ID NO: 204625 - protein, 95 aa, Oryza sativa
  Clone ID: PAT_MRT4530_99694C.1.pep
PPVYSLGAPPGFKGSGQGFFTPGPPPKVGGGVFPGIKPRPFFYPPGGPPGPPGSGGGFLGVFFPPQAPWGRVLLGYKKKPAPVQRKEKKTWNLRV

SEQ ID NO: 204626 - protein, 62 aa, Oryza sativa
  Clone ID: PAT_MRT4530_99695C.1.pep
MVDLISVLAGIVFLPGYQRKGCADYLLHLLRVSYTYANHGSSAPAVAMSEDPTIANVVVGRT

SEQ ID NO: 204627 - protein, 377 aa, Oryza sativa
  Clone ID: PAT_MRT4530_99696C.1.pep
MAQLRLTLLAMSLLILSPAMDGGGGGTVQAQIVPAAISFGDSTVDVGNNNYLPGAVFKANYVPYGVNFGSRPETLGFESYAPPYLSPQAKGDNLLLGANFASAASSYHDDTAAMYTVSLVSLSKTTSFTNMEGVQAKVPIFGEDAITLTQQLKYYKEYQSKLAALIGQKNATAILSDALYIVSTGTGDFIQNYYHNASLSSRYNVNSYCDLLISIFSGFANLVLWVQELYRLGARRIGVTSLPPLGCLPATIRLYGKGRSGCVERLNGDAETFNNKLNITVEALAKKHSDLKIAIFDIYTPLRNMSESPASQGFLEARKTCCQTGTRKTRVYLCNPATAGLCRNASDFVYFDGVHPSEAANLVIAESTILAGISLVT

SEQ ID NO: 204628 - protein, 83 aa, Oryza sativa
  Clone ID: PAT_MRT4530_99697C.1.pep
TVSSSGCGSDPLASASTVNSTGCGSVPLASASTVSSTGCGCSLLTNRVQVYPRRPDLVLPEGATVLPFSDDVWVAVSLPTLNH

SEQ ID NO: 204629 - protein, 59 aa, Oryza sativa
  Clone ID: PAT_MRT4530_99698C.1.pep
LCLAIVATTEQQTVSILRNLGQQNIHVGYNLDAGTVTFAAADCAGSGWPAKQTSGGQAC

SEQ ID NO: 204630 - protein, 173 aa, Oryza sativa
  Clone ID: PAT_MRT4530_99699C.1.pep
HTSNINHFSRTMLLRFNPPCRPFHVFQFVWQEIRMASLQYKRGLPYAPHIMRMIEHVTQLQFVCEEPHSALSLRLPKRGSVPQDIPSSSSQPPSAPERPSSVAHREPSPLFRILRTLFGICSAGAKKNRRLRNSEKKTARDIKCRSRATDLLVVGWEKFVKAGSCLRKGRDIS

SEQ ID NO: 204631 - protein, 84 aa, Oryza sativa
  Clone ID: PAT_MRT4530_9969C.1.pep
SSMIHSNTSDSWLLQALLWWLAWSTGLRFQLLYLFFGVHLDLESTPSLFAIPPRPVVEFVPANSFVDSYSHKKCHTLIRIYIQG

SEQ ID NO: 204632 - protein, 217 aa, Oryza sativa
  unsure (1)..(217): unsure at all Xaa locations
  Clone ID: PAT_MRT4530_996C.1.pep
MLRGLWYRGQRSVFLVSARKERRVTSILLHCPPILVFMKGRWTNLMRAGRKGLRCLPPSPASSAAVAGDDEAGLQEDHGRRPLLAGLGWRTPAPPLLAGWRSAPAAGGGDGSRRRRRATRRDGLGRRRASASSRWPSSYPSSSGPSLXATQKSMCSGVPELCLSSAEEHARLRRIIFEINSIYTTMWLHHPRCLRPSPCRPPLSSFSTAASLLPAHR

SEQ ID NO: 204633 - protein, 93 aa, Oryza sativa
  Clone ID: PAT_MRT4530_99700C.1.pep
MPSGANSPTAAIAVAAVFAVLVLSSSVAPAAAKMFCGSCDDICTASCIYADTIPRACAPQCDGCSPEACQSCLQALRQECLTSCGDSCRKNCT

SEQ ID NO: 204634 - protein, 194 aa, Oryza sativa
  unsure (1)..(194): unsure at all Xaa locations
  Clone ID: PAT_MRT4530_99701C.1.pep
SNPLSLFDRGEIRGSIVSSPPPPLVRASESIHAPPARSLARSVSPRGHFAQCCAXLCWLKFTMGGCVGKGRRHIEEDKLDFKGGNVHVITSKEDWDRKIEEANKDGKIVVANFSASWCGPCRVIAPIYAEMSKTYPQLMFLTIDVDDLMDFSSSWDIRATPTFFFIKNEKQVDKLVGANKPELEKKVQALADGS

SEQ ID NO: 204635 - protein, 237 aa, Oryza sativa
  Clone ID: PAT_MRT4530_99702C.1.pep
MAAEDELKLLGFWASPYVCRVKLALHLKGLIYDYVKEDVFTNKSELLLSCNPVHAKVPVLIHNGKPICESQVIVQYIDEVFPDAGVTLLPADPHDRAAARFWAAYIDDKLLPPWVHAYRGKTDEEKAERMKQTLAVVDALETAMEECSKGNAFFGGDTVGYVDVALGGLLSWLHGTEELCGAKILDAAKTPLLSAWARRFGELDAANAALPDVGRLVEFCKMRHVELEAAEAAAARN

SEQ ID NO: 204636 - protein, 91 aa, Oryza sativa
  Clone ID: PAT_MRT4530_99703C.1.pep
MEDFYVTIPYGAAVLGGGVAGYLKRGSKASLAAGGGFGGALLLAGALSARAFARGHPGGSLFATVLQTGPFLVVLLQCYSPPILHSSPPFY

SEQ ID NO: 204637 - protein, 217 aa, Oryza sativa
  unsure (1)..(217): unsure at all Xaa locations
  Clone ID: PAT_MRT4530_99704C.1.pep
MGKEKTHITLSXLEPDSGSGPPRAHQIYKLGGIDKRVIERMQKEAAEMNMRYFKYAGWLDKLKAERERGITIDIDLRKCETTKYYCTVIXDAPGHRDFVKNMITVTFQADCAALIIDSTTGGFEAXISKDGQTREHALLAFTLGGKHMICCCHKMDATTPKYSXKARYDEIVKEVXSYLKKGGYNPXQIPLVRIYGFEGDNMTERCTNLDWDKGPTL

SEQ ID NO: 204638 - protein, 206 aa, Oryza sativa
  Clone ID: PAT_MRT4530_99705C.1.pep
MVKEDFAKLVISGTNNNYLAWACKVESHLARNGLSDTIVPGSNCTDAEKATTVLFLRRHLGETLKNEFMFEMDPSVLWQSLKDRFDEQKPIILIQARYDWEHLRFQDFDSVAEYDSTLRDIVSKLKLCGRDVSEDEMIEKTLFTFHPSQLVLQMMYMDRHYQKYSELISALLLVEEGDRRLLENYYDRAGGSQHVQRASCRGQSNF

SEQ ID NO: 204639 - protein, 472 aa, Oryza sativa
  Clone ID: PAT_MRT4530_99706C.1.pep
MAKKKDVEVEELDEEVVAAAAAPAADGGEEQEAEPPARRPSTFAELGVVPELVAACDAMGWKEPTRIQAEAIPHALEGRDLIGLGQTGSGKTGAFALPIIQALLKQDKPQALFACVLSPTRELAFQIGQQFEALGSAIGLSCTVLVGGVDRVQQAVSLAKRPHIVVGTPGRLLDHLTDTKGFSLNKLKYLVLDEADKLLNVEFQKALDDILNVIPKERRTFLFSATMTNKVSKLQRACLRNPVKVEVASKYSTVDTLRQEFYFVPADYKDCFLVHVLNELPGSMIMIFVRTCESTRLLALTLRNLRFKAISISGQMSQDKRLGALNRFKTKDCNILICTDVASRGLDIQGVDVVINYDIPMNSKDYVHRVGRTARAGNTGYAVSLVNQYEAMWFKMIEKLLGYEIPDRKVDNAEIMILRERISDSKRIALTTMKEGGGHKKKRRKNEDDEEEEERNAPVSRKSKSFNKSRRR

SEQ ID NO: 204640 - protein, 141 aa, Oryza sativa
  unsure (1)..(141): unsure at all Xaa locations
  Clone ID: PAT_MRT4530_99707C.1.pep
QKLVAWNTLLPRIANLVLTQDQDKFHWNLTQNXEFSVKSHYLALVHSDLPNINKVIWKLKIPLKVKIFLWYLRRGVVLTRDNLAKRNWQGSKNCCFCHKDETILHLFYECRLQMSNCSCNPGSRRMLGKPLGLRPSLSELI

SEQ ID NO: 204641 - protein, 215 aa, Oryza sativa
  Clone ID: PAT_MRT4530_99708C.1.pep
MELPLGPARAPAAAALPCRFSPTFRPHAPPPAPSNSRAHPPLLARARRNKSSRIDADADAEPKVITIGRPGKKSRRRRGQPPPSKEEGSEEEDEEEEEERDVAIPEVVTNRMMRRVGVSVGAPLAVGVAFLPAFYYLKKAAKVDVPTWIPFGVSFLFFGAALLGVSYGIVSASWDPAREGSLLGWNEARRNWPVFWDSLRGGGGGPSSPPPPRRR

SEQ ID NO: 204642 - protein, 202 aa, Oryza sativa
  Clone ID: PAT_MRT4530_99709C.1.pep
MASHLDFRYLDEGLGGERGKRKRREAEEAAAADSMDLDADADAPRPSKLRAVPSLSDPSKPASFGQPTYDGVIAGRVSGRRWKEARTRRASALAASRKPTPLEQRARDKSLKRAYQARVAELKEEIRQSKAAKRKQREEREKRKKENVLRSGTKLQRVTNPKTIQKIAKSKKRKQLKVVPDEFLGGKKSDANRRMQVPGLDN

SEQ ID NO: 204643 - protein, 832 aa, Oryza sativa
  Clone ID: PAT_MRT4530_9970C.1.pep
MGIFEPFRAIGYITAGGVPFSVQRLGTETFVAVSVGKAFHVYNCAKLNLVLSGPQLPKKIRALASYKDYTFAAYGSDIAVFKRTDQVVTWSKHEEKINILYPFGEYILSADIKGNVFIWSFRGSEPNIGCSDGTIHVHNIRYDEELMSFNHQIRGAVTALSFRTDGQPLLASGGSSGVISIWNLEKRRLHSVIREAHDASIVSLHFFANEPILMSSASDNSIKMWIFDTNDGDARLLRFRSGHSAPPRCIRFYGNGKCILSAGQDRAFRLFSVVQDQQSRELSQRHVSKRAKKLGLKEEEIKLKPVIAFDCAEIRSRDWCNVVTCHTDTPQAYVWRLQNFVIGEHILTPSSGSKSPIKACAISACGNFTFLGTEGGWIEKFNLQSGISRGSYIDTSLAIKRAHDGEVVGLACDATNGSLISAGYGGDIKVWDFKSCKLKSRLDIGKSVTKIAYHRANGLLATVADDMVLILFDTVAMKMVRRFEGHTDRVTDLCFSEDGKWLISSSMDGTLRIWDISLARQIDAMHVDVSITSLSMSPNMDVLATTHVDQNGVYLWVNQALFSPSTNVDNYSSGKHVRNVRLPTVSSTEKSEEEPIHSSEDSKESKVKPYVIMDHQIPNMITLSLLPKSQWQSLANLDIIKVRNKPIEPPKKPEKAPFFLPTVPSLSGEILFEPAANSKETDSSTEDTSHKKMADLSSHFSRLLQSCGDTKNYSAFTDYLKGLSPSSLDMELRVLQLIDDEPQNLEQRPELQSISLLLDYFIHELSCRNNFEFVQAVLKLFLKIHGETIRRHSMLQDKVKKLLDVQSLVWQKIDKVFQSARCMVTFLSNSQF

SEQ ID NO: 204644 - protein, 79 aa, Oryza sativa
  Clone ID: PAT_MRT4530_99710C.1.pep
LLCFLCERPVPFFFFFFLKFFFFFFFYYFYMFHVYIMSTLYLLFLLICPSKYLVSCHDTLPILFQDFKLGPNDPYTKKI

SEQ ID NO: 204645 - protein, 37 aa, Oryza sativa
  Clone ID: PAT_MRT4530_99711C.1.pep
MYFPEGSQYSLLTNHIKVSLEGSKPKDLIVPRSVRNP

SEQ ID NO: 204646 - protein, 70 aa, Oryza sativa
  Clone ID: PAT_MRT4530_99712C.1.pep
MAAERGELRHQANNNLWHGLHRVGGGEPVGRRSPPLPKWEELMGRDWTYHIRSMSSFMNKDRDKNDYGQV

SEQ ID NO: 204647 - protein, 102 aa, Oryza sativa
  Clone ID: PAT_MRT4530_99713C.1.pep
LERQRRPLGRTKPRRWHNGGQPGKCCHCDNNGDVGLHLSPPHWWQGHHICPPRRLGRLSLLDVLGNLNTSTGYSTSMISSRGGSILSLKHVLAVLVLIMLYL

SEQ ID NO: 204648 - protein, 264 aa, Oryza sativa
  Clone ID: PAT_MRT4530_99714C.1.pep
MADDDGYRCQQRRRRRLVQRMVACFGMLSRRRRTVRLVLWGGEVRAARHGKMAGQVMLDFTDSVVCRADGFCIGRPAPVLAIEDRLVAGRTYLVLPVDRLPQGYDAVTAASLAALSYDRGGAGAGAAGATSIAGGAKSPFEYVKGDDGRTVIKVTPEFIVRSITSSRPIGACAAAGDEVVEGGGGGGGAQLCSTPELRKHYEQLVGAARCRAWSPRLETIKERKGARRIVVAAQLIHFDLNKFSDEFEFGYYWRVQEFIYVQLS

SEQ ID NO: 204649 - protein, 77 aa, Oryza sativa
  unsure (1)..(77): unsure at all Xaa locations
  Clone ID: PAT_MRT4530_99715C.1.pep
QRPHGKSRDGHGRTVEHDIDQRNXDRWIEHFRRRSRPXSMVAINKKTTRYGAQVDGGGSDWXSNRWKXHFGRVTRIF

SEQ ID NO: 204650 - protein, 120 aa, Oryza sativa
  Clone ID: PAT_MRT4530_99716C.1.pep
MDTVPFKLAQGHREIAQRGAKQSSSTHALDPPKQEVVKPSPPGRIRNSTPSSPNLLVSSADADAKNMCCYSALPSACPSSPLFPILSSGSHARALLSKIRQARDGTGRGDGGGLKGAWRR

SEQ ID NO: 204651 - protein, 1380 aa, Oryza sativa
  Clone ID: PAT_MRT4530_99717C.1.pep
MVAALVGEGDVEDVGGRGDEPQTPTVGDGGGGRPPDLAVGRRGRRQAAPAGGQEAREVAANAGGRRRRGRWPRTPAVDGRSAGEAAAAGSTSPKFVEVGSGGRRRRLTVRRRGRWPQTPAVAGSASSKLVEAGSGDRLLGDGGRRRRPRAPGGRRRAKETATRSWEGGGRPRQPVVVGGSDSRWRVDRATADGRVAVPTTFAVGRGGVYVQPAPLPKCLGQSPVTGGHYNEASEAMLYTKPSSYPPHRRGLGRAAARYRAAGACAAAPGRHPAPPRANRLPLRRALTWNDVNNLISILKFFGEATGLQVNLHKSSVVPIKCAEQNLSEVLENFNGQRGNFPITYLGLPLTPGRIKRIHLQPVMDKLQSRIGYWMECADYFIGSGRRCSPSTSTSTSREAWRPEKQWRKATNVIRGCHRLLRLGVLSAAAGIMRRNPSYVEIKVHDEGELDVSSGGDGEAPVAFTVAADDESFKGLVKNKREDCFRLLGGGAGVAAVLASGAERGIRGDDADVARRKKAFGSNTYPKPKPKGFFRHVWDALADVFLIVLLVCAAVSLAFGIKEHGIKDGWYDGVSIFLAVFLVAAVSAVSNHSQGKRFDKLARESENIMVSVVRAARRQEVSIFDVVVGDVVVLKIGDVVPADGVFLDGHALQVDESSMTGEPHPVEVDAVKSPFLASGVKVVDGYGKMVVTAVGTDTAWGEMMRTITRENTDPTPLQERLEGLTSSIGKVGIAVAVLVFAVLTARHFTGSTRDEQGNALFDKRNVTFNAVFSGLVGIFQQAVTIIVVAIPEGLPLAVTLTLAFSMKRMVRENALVRRLSACETMGSVTAICTDKTGTLTLNQMKVTEFWVGADRPRSAAAVNGGVVRLLCQGAGLNTTGSVYKPDNVSPPEITGSPTEKALLSWAVEELPMDADALKRKCKVVRVEAFNSDKKRSGVMLRDAATGAVTAHWKGAAEMVINDMAAASLRCIAFAYKQVVDGGDSDNAKIDDEGLTLLGFVGLKDPCRPEVKSAIEACTKAGIAVKMVTGDNVLTARAIAKECGIISGNDDDAAGVVIEGHEFRAMSEQEQLAIVDNIRVMARSLPLDKLVLVQRLKQKGHVVAVTGDGTNDAPALKEADVGLSMGVQGTEVAKESSDIVILNDNFDTVVTATRWGRCVYNNIQKFIQFQLTVNVAALVINFVSAVTTGRMPLTTVQLLWVNLIMDTMGALALATDTPTAGLMRRPPIGRAAPLISNAMWRNLAAQAAYQVAVLLALQYRGFGGAGAGERANGTMIFNAFVLCQVFNEFNAREIERRNVFAGVHRNRMFLGIVAVTVALQVVMVELLTKFAGTERLGWGQWGACVGIAAVSWPIGWAVKCIPVPERPFHEIITARRRRRRST

SEQ ID NO: 204652 - protein, 1035 aa, Oryza sativa
  Clone ID: PAT_MRT4530_99718C.1.pep
MECADYFIGSGRRCSPSTSTSTSREAWRPEKQWRKATNVIRGCHRLLRLGVLSAAAGIMRRNPSYVEIKVHDEGELDVSSGGDGEAPVAFTVAADDESFKGLVKNKREDCFRLLGGGAGVAAVLASGAERGIRGDDADVARRKKAFGSNTYPKPKPKGFFRHVWDALADVFLIVLLVCAAVSLAFGIKEHGIKDGWYDGVSIFLAVFLVAAVSAVSNHSQGKRFDKLARESENIMVSVVRAARRQEVSIFDVVVGDVVVLKIGDVVPADGVFLDGHALQVDESSMTGEPHPVEVDAVKSPFLASGVKVVDGYGKMVVTAVGTDTAWGEMMRTITRENTDPTPLQERLEGLTSSIGKVGIAVAVLVFAVLTARHFTGSTRDEQGNALFDKRNVTFNAVFSGLVGIFQQAVTIIVVAIPEGLPLAVTLTLAFSMKRMVRENALVRRLSACETMGSVTAICTDKTGTLTLNQMKVTEFWVGADRPRSAAAVNGGVVRLLCQGAGLNTTGSVYKPDNVSPPEITGSPTEKALLSWAVEELPMDADALKRKCKVVRVEAFNSDKKRSGVMLRDAATGAVTAHWKGAAEMVLARCTVYVGADGAARELGVEQRRKLEQVINDMAAASLRCIAFAYKQVVDGGDSDNAKIDDEGLTLLGFVGLKDPCRPEVKSAIEACTKAGIAVKMVTGDNVLTARAIAKECGIISGNDDDAAGVVIEGHEFRAMSEQEQLAIVDNIRVMARSLPLDKLVLVQRLKQKGHVVAVTGDGTNDAPALKEADVGLSMGVQGTEVAKESSDIVILNDNFDTVVTATRWGRCVYNNIQKFIQFQLTVNVAALVINFVSAVTTGRMPLTTVQLLWVNLIMDTMGALALATDTPTAGLMRRPPIGRAAPLISNAMWRNLAAQAAYQVAVLLALQYRGFGGAGAGERANGTMIFNAFVLCQVFNEFNAREIERRNVFAGVHRNRMFLGIVAVTVALQVVMVELLTKFAGTERLGWGQWGACVGIAAVSWPIGWAVKCIPVPERPFHEIITARRRRRRST

SEQ ID NO: 204653 - protein, 147 aa, Oryza sativa
  unsure (1)..(147): unsure at all Xaa locations
  Clone ID: PAT_MRT4530_99719C.1.pep
RAQLINIPLYRXPSSIEKILVDAEMEQQHQASTGRKYQDHARXKPSTQVTSSPASQPASLASSHQPXCVGTASSQRRRDVDDRQXPAIVLPLPPPSPPPXLIRRFDHDRXQQNLQQMQXQTRAETECAPLRDPSLRTRACDVIALNR

SEQ ID NO: 204654 - protein, 94 aa, Oryza sativa
  Clone ID: PAT_MRT4530_9971C.1.pep
SSRVMAATKEAAGAEGGGGAARVNGDGGVPAVDGLGVVVDDVGGGAEAGGSPRQRRRAGVNANLRNVMDKRRHQRDGERALIHEADPEESRRRA

SEQ ID NO: 204655 - protein, 37 aa, Oryza sativa
  Clone ID: PAT_MRT4530_99720C.1.pep
IQGNSYYIVLGIHKVSLVFILMAHSHVTKNWMYNFSY

SEQ ID NO: 204656 - protein, 122 aa, Oryza sativa
  Clone ID: PAT_MRT4530_99721C.1.pep
GRSRVDYDCFGDVVVFDTAYRTSKYNMICAPFVGVNHHGQDVMLGCALLLDESLTSYEWLFKSFLDSMGGHPPKTIFTVMAETISKAIEGVLPETRHCICQWSIEKNLQSHLGTLKWFWNIS

SEQ ID NO: 204657 - protein, 83 aa, Oryza sativa
  Clone ID: PAT_MRT4530_99722C.1.pep
SHKYQVILLARFTIDTSRDDVVRHVQQSGSCYSEFHSITDTYNSNKQDICIFLFGTNEVIKTFSHAFHDAITTPMVLRPQDIH

SEQ ID NO: 204658 - protein, 71 aa, Oryza sativa
  Clone ID: PAT_MRT4530_99723C.1.pep
RSYQCCGRSINILQHSRPTAINNGRDTLIESRSATVSGADIYQSYKGRYPRNTSHITCTRDCLIQGSSGHQ

SEQ ID NO: 204659 - protein, 92 aa, Oryza sativa
  Clone ID: PAT_MRT4530_99724C.1.pep
LLEKSHRLPIDMLLSIWVSQCKACKMSISSSLFSDILYITTKKVPFRSRVLIERLKLQPLLQRNCACNISSFLLLAKTMLWLTRIRRTRMVH

SEQ ID NO: 204660 - protein, 41 aa, Oryza sativa
  Clone ID: PAT_MRT4530_99725C.1.pep
SPLCCPEEWSPTGDPKVGGTPGVFFWAVTLSGRLGGGALLV

SEQ ID NO: 204661 - protein, 123 aa, Oryza sativa
  unsure (1)..(123): unsure at all Xaa locations
  Clone ID: PAT_MRT4530_99726C.1.pep
TDRPPPATPPPPPPPPPPPPPQRPGQAXNPRPQAHSXTNTNPASPXTHYSPTPTTPPPAPHPSTPERHPFPPHATAPEPPPPSSTPDQPPLPSPHPRPPLQPIGLPARRRASPPPKPAPRPRP

SEQ ID NO: 204662 - protein, 347 aa, Oryza sativa
  Clone ID: PAT_MRT4530_99727C.1.pep
MASSKTVLSAIFTASLCFTVALAFPAHHEDLHPVVQSPPKPVLSPDYYKATCPQADEIVVSVLKKAIAKEQRIAASLLRLLFHDCFVQGCDASVLLDDSEEFVSEKKAIPNKNSIRGFEVIDEIKAALEEACPHTVSCADTIALAARGSTVLSGGPYWELPLGRKDSKAAYMKLANKNLPPPNATLHRLVKFFERQGLDKVDLVALSGSHTIGMARCVSFKQRLYNQHRDNQPDKTLERMFYSTLASTCPRNGGDNNLRPLEFATPSKFDNTYYKLLIEGRGLLNSDEVLWTGRDPQIAGLVRSYAENEPLFFEHYVNSITKMGNINPLTGYDGEIRKNCRVVNKKI

SEQ ID NO: 204663 - protein, 51 aa, Oryza sativa
  Clone ID: PAT_MRT4530_99728C.1.pep
SPGCRNSARGRHPPWVMLRLLLTDGIICRSHVNFTLILQPNGGDTCIYFLL

SEQ ID NO: 204664 - protein, 51 aa, Oryza sativa
  Clone ID: PAT_MRT4530_99729C.1.pep
AWADLVSVVGFILTIVASLQLIKASFNASYFAVFAHDSMQHLITRVHVTNV

SEQ ID NO: 204665 - protein, 48 aa, Oryza sativa
  unsure (1)..(48): unsure at all Xaa locations
  Clone ID: PAT_MRT4530_9972C.1.pep
ANKVILKDMPDAVIVVILAGSXRPVTKDFRPNGVGMFVDTVAGTPTIG

SEQ ID NO: 204666 - protein, 190 aa, Oryza sativa
  Clone ID: PAT_MRT4530_99730C.1.pep
MITRRGARGGGATDERRRARRGGARDDATDDGDGDVGGDATAMGRRAAARGSGLRRRGSARATARGALRWLRDGDSARRGSGDGMRRRRRTAAARGARRQARVAARGDATAARRGSGNGDGARCGGGDKTRRRWRDGDGGAAARDDGDATATRRGSGDAMDGLGAARGRGGRGGGRLGTTSNTLGAMNSA

SEQ ID NO: 204667 - protein, 170 aa, Oryza sativa
  Clone ID: PAT_MRT4530_99731C.1.pep
MKHPRQEEEVSLALALSTDCSSTASDSSAAAAGGAARRKRARRRSVVATSGEGEFVCKTCSRAFPTFQALGGHRTSHLRGRSNGLDLGAIGDKAIRLHRAADKEHRDKHECHICGLGFEMGQALGGHMRRHREEMAAAGGGSSADDWVWRCDARPEGIAAEPPVLLELFA

SEQ ID NO: 204668 - protein, 82 aa, Oryza sativa
  Clone ID: PAT_MRT4530_99732C.1.pep
GQWGPPAPFPPWGFFLISFNKKVVRKFKIPPPLLFFSLLNFGLYKKKKKKKKKKKKKKKKKKKKKKKKKKKKKKKKKNPPNK

SEQ ID NO: 204669 - protein, 62 aa, Oryza sativa
  Clone ID: PAT_MRT4530_99733C.1.pep
MDGLIFFNISRRPDLSGGAEGSWEEHGTDYSPPPPTSNRSPLSSSTPTITASTVLAQKEGRR

SEQ ID NO: 204670 - protein, 49 aa, Oryza sativa
  Clone ID: PAT_MRT4530_99734C.1.pep
GTKGGGGNKQKQALCYLLNKESHGQQGPGKGGLPTNGLLPGGPGKGYQL

SEQ ID NO: 204671 - protein, 64 aa, Oryza sativa
  Clone ID: PAT_MRT4530_99735C.1.pep
FVFYGLASWPLKQVRYPWSATFSVLNFLIRFGQNSASPHSAFHNDLVSLRSIKNPGYVCSAPEH

SEQ ID NO: 204672 - protein, 73 aa, Oryza sativa
  Clone ID: PAT_MRT4530_99736C.1.pep
MGKEKTHINIEDIGHVDCGEATTTGHVIYKRGGIDKRVNEKDQGGRRLRINTAHERGWHDNRIEAIHYPATHP

SEQ ID NO: 204673 - protein, 351 aa, Oryza sativa
  Clone ID: PAT_MRT4530_99737C.1.pep
MVEPVKSELGSLFLPPGFRFHPTDAEVILNYLLEKFINPSFTSLPIHEVDLNKCEPWDLPTARMGNNEWYFSRKDMKYPTGMRTNRATKEGYWKATGKDREIFKPAIYEGSSKNNKQLVGMKKTLVFYMGRAPKGTRTNWVMHEFRPHANLHNHYPNLRLNPNEWVVCKVFHKKQGDEAINNQQQQPAVDQADDDDIFQLDDIFADPSIYDFSNSSANILSAPPNNNAVHSSVSAGTTMTSTTTASSFQHQPNCYSAPLQQHVSSWNNTPGAGGAHGIGSSYYNLQQQQQQAAMVKDLEDIIAVPDYGTLLPSSNKGSSIRSATAGVSQQNPLGVPQYKIENYGDHYISRE

SEQ ID NO: 204674 - protein, 145 aa, Oryza sativa
  Clone ID: PAT_MRT4530_99738C.1.pep
MAEIILNNHCEGCAIDIRKAVEKMFGVKRVWVDMYGRRVVIAGRKVDATKLRERLRRKTGKSVTIVSDGTPPPPPDDVPFVGMMHLAPSPPYYPLPAPPPPPPPGSYLYGGNYPCQNPYHQYVQGGMPARFVGDDTYDDGCCSMQ

SEQ ID NO: 204675 - protein, 374 aa, Oryza sativa
  Clone ID: PAT_MRT4530_99739C.1.pep
MYKNQLQELAQRSCFSLPSYVCTREGPDHAPRFKATVTFNGETFDGPSNCTTLRQAEHAAAEVALARLSLRGPSSSLTARVLDETGVYKNLLQETAHRAGLKLPVYTTVRSGPGHSPVFSSTVELAGMSFAGDPAKTKKHAEKNAAMAAWSSLKQMPEARKEPGGGGGEEQEHVVVARVLAALKPRDDCGGGGGEGKAAAASLPKKHLAGASCSSATSLYRHQWGRPSPPPPAAGPKILPPLHLLQQQQAAASGSRAAAAELEQERRKAAELVHMLHAVMLRDRAADAMPPPMPCYYAPYYHHGGGVAPTRPFAGAAGFHAPPAVSVRSVIPGLRRATVAAAAAAQGGRSSDLIQEGVVVVKTSIQSIAQPAPI

SEQ ID NO: 204676 - protein, 90 aa, Oryza sativa
  Clone ID: PAT_MRT4530_9973C.1.pep
MGRQGQCREPPVTAARAAATVAGGKAGREEESEEERRGVDNVTGYGEKRRGYGEKEKRMRLVDHMAYPCKWRKKPLEDMGGIVMETIPKF

SEQ ID NO: 204677 - protein, 79 aa, Oryza sativa
  Clone ID: PAT_MRT4530_99740C.1.pep
MEMMAASGGQQAAGCGGRYFQMPLHYPRYRKEDYERMPEWQLDRLLSEYGLPVDGNLQHKRAFAIGAFLWGAGGGANAA

SEQ ID NO: 204678 - protein, 637 aa, Oryza sativa
  Clone ID: PAT_MRT4530_99741C.1.pep
MLRSPGHSPRHLSPSPAPSTPRPSSPTPSSASASASASALAAAATTTTSSKRRRPEVLDEDTYVAAVERIIERDFFPDLPRLRDRLDWLQALRSRDPLVLRDAQLKILERRRRAQRQRQGGPVPTPTPATSTALRSPSFLATPSVAPSVAGDEGADVDDDVEAALSLDDFFRRFTSEDNESFSRILEKVNHRRRERYAHLLEPGEVAKAPQLEDAKRDRITDGYGTSGQPLSTLEGAKFTAKNLLMYYPADRGEAPLTDEERAERLKGMTKEIDRSNTRFHGKSSVDDGAKEEEAAAILYAPVAGSTPGGMAYHDPDKAKKYDLEDLRKTPNPFYVESGKNANNGYSFVRTPSPAPGVDESPFMTWGEIDGTPLRLDPEETPGGSGGSDRAHFKIPPPPARDVKAHLLSRDAARKIKERTKMFHKPPLPSPVRGGSASPRTFSPAAQKFVRNAIAKSSRTIDESLRASYRAAQVVTVHGHVLAGVDPLVVGEVDAVAGAPRQVPRVGDERHTGPSFHGRLFSFLFSTAAAQWDNDRERLMVSTLHIPLPPRGAAESRMAVDGLDIRTKEEGHGVDSRWSGQRGGEYATASLAENDVGLPTGEAAVTSVSLRRLTVTGTGTACFFILLPTGRHNPHHG

SEQ ID NO: 204679 - protein, 88 aa, Oryza sativa
  unsure (1)..(88): unsure at all Xaa locations
  Clone ID: PAT_MRT4530_99742C.1.pep
FFFFFFFRRLFFXNNRHCGITXSVYMEGAMGSWGGPGENKLLTFGPIPLNIQGFSRPERKGIHEGRVKGGMCSIFASNYWPRARYGTL

SEQ ID NO: 204680 - protein, 73 aa, Oryza sativa
  Clone ID: PAT_MRT4530_99743C.1.pep
AKVEGPPPSKIFYEKNPLGPPVFLLDFKNKTGPIPQIFFSVSPQKKKKKKKKKKKKKKKKKKKKKKKKKKKKQ

SEQ ID NO: 204681 - protein, 148 aa, Oryza sativa
  Clone ID: PAT_MRT4530_99744C.1.pep
MTPVIPAWSQEATRLLFSKKISVLFTPSYNELTSFYLGVRGLLGIATDPYFLKIEHEAHVRVGVPETSSHTYRGGLPYLATTLLPPEGLHLHAGHLRRRQVTSSPRSNRAVSLKVGKLRFLLFQALALALNLLSLWLNFVIALIGLVP

SEQ ID NO: 204682 - protein, 80 aa, Oryza sativa
  Clone ID: PAT_MRT4530_99745C.1.pep
HPATIPLIMQRQRRIKHCLCCTLVARELGGSGNLPRRTYVHHSLHPKSSGNQRSVTFVLWDVLLLCAVPLAHFLAMKNPI

SEQ ID NO: 204683 - protein, 116 aa, Oryza sativa
  Clone ID: PAT_MRT4530_99746C.1.pep
TKISKGPRKNQADGTRVPLTRMDKKRQNSQLFCTSNNPPKLAIRVSDDQTPPKPKGLQEKEEEEDDGDGDGWPLDRFPERRGAHGEALRKKLSSLLLTLSFPSIRRQMSCLSLGNA

SEQ ID NO: 204684 - protein, 98 aa, Oryza sativa
  unsure (1)..(98): unsure at all Xaa locations
  Clone ID: PAT_MRT4530_99747C.1.pep
DCVRRVNGFVVGYSRTVASEGMAALHRGFNISWVVLHSYPCLFSPVYDAPGPGALVGNLXDHLLASLLLGWGGTIVAGLPSXTTDTVLGWMIMTSGEA

SEQ ID NO: 204685 - protein, 200 aa, Oryza sativa
  Clone ID: PAT_MRT4530_99748C.1.pep
LSPRRRGQISVAAKVRACFHRATRRWIRAGRAATGFMLEPITGSAPPVVAGNGSVCVEARSMPPPEPTPTAAVPPTARSIWGRTATGLQLEPIAGSARGRAKGATAVAHASRRHSRQIHRPCRSRRPPSQQPLPRVVPLPDPTPFNAGGDRRAWGSMEEAAARRCPHSPPPSLTVHLRHQCLPSGGRRGEKRSWERKKSG

SEQ ID NO: 204686 - protein, 181 aa, Oryza sativa
  Clone ID: PAT_MRT4530_99749C.1.pep
GCRGARWRARAPRLCRLPRLLPLAAAAAASKPYLPGKPSPAPPPPLSSPPPFPSLSRLFSTTPSSSGDSSMVVVGSAESFTSIMSKVEAEKLPAVFYYTAVWCGPCRAMAPVISKLSSRYPKIPIYKVDIDMDGVGSKLSDLKIFSVPTFHFYYQGRKTGEVVGANATKLESTMESLHKQL

SEQ ID NO: 204687 - protein, 727 aa, Oryza sativa
  unsure (1)..(727): unsure at all Xaa locations
  Clone ID: PAT_MRT4530_9974C.1.pep
MAGDRAEEEEGEAPPPEARAAAAVERVAADSAAGALRGGAPGAEAGGGGGGGGGAGAGAARRRARGGARAAPARPRGEQDLLARFLVELRLLLVQCDQYMFFFCGAILWILSIALNCSFEERPQTLHRVRVINGMLYECYDIILVLERDSVMKKFQGVILQLEQALCDIPYNELDISDEVREQVELVHAQLKRAKERIDMPDDEFYNDLLSVYDKNYDPSAELAILGRLSEKLHLMTITDLTQESLALHEMVASGGGQDPGEHIERMSMLLKKIKDFVQTQNPDMGPPMASRVLDSNGDSRPITIPDEFRCPISLELMKDPVIVSTGQTYERACIEKWIASGHHTCPTTQQKMSTSALTPNYVLRSLISQWCETNGMEPPKRSTQPNKPTPACSSSERANIDALLSKLCSPDTEEQRSAAAELRLLAKRNANNRICIAEAGAIPLLLSLLSSSDLRTQEHAVTALLNLSIHEDNKASIISSGAVPSIVHVLKNGSMEARENAAATLFSLSVIDEYKVTIGGMGAIPALVVLLGEGSQRGKKDAAAALFNLCIYQGNKGRAIRAGLVPLIMGLVTNPTGALMDEAMAILSILSSHPEGKAAIGAAEPVPVLVEMIGSGTPRNRENAAAVMLHLCSGEHHLVHLARAQECGIMVPLRELALNGTXDRGKRKAVQLLERMSRFLVQQQEEQESQSQASAQVPPQATPEQVPENDIPEQLDSPASQYPMVV

SEQ ID NO: 204688 - protein, 189 aa, Oryza sativa
  Clone ID: PAT_MRT4530_99750C.1.pep
MALAHRLCRLPRLLPLAAAAAASKPYLPGKPSPAPPPPLSSPPPFPSLSRLFSTTPSSSGDSSMVVVGSAESFTSIMSKVEGLDHGLMDARDFLFAAEKLPAVFYYTAVWCGPCRAMAPVISKLSSRYPKIPIYKVDIDMDGVGSKLSDLKIFSVPTFHFYYQGRKTGEVVGANATKLESTMESLHKQL

SEQ ID NO: 204689 - protein, 435 aa, Oryza sativa
  Clone ID: PAT_MRT4530_99751C.1.pep
MNQFVPDWSNMGDASRTLGEDDNLIELLWCNGHVVMQSQNHHRKLPPRPPEKAAAAAVQEDEAGLWFPFALADSLEKDIFSDLFYEAPVAATAEAAPAGPGAGADGEGKTCKGDAAMAEEERGGPGAASEAPRELMPPPKSTNASCSRQQTMSLADGGDNAGDLSELVRARRSSGGAARRKAEAGGGGGGASSSMLSAIGSSICGSNQVQPTSTSNRSSKRKRLDTTEDSESPSEDAESESAALARKPPAKMTTARRSRAAEVHNLSERRRRDRINEKMRALQELIPHCNKTDKASMLDEAIEYLKSLQLQLQMMWMGSGMAPPVMFPGVHQYLPRMGVGMGAAAAAMPRMPFMAAPQPVVPTPPVNHLDLGVNHLQPPPTQGVGYYPLGAKAVQQQQNPPLHVPNGSIMPPPENAPNTGSGMGSFYFYFYFSSD

SEQ ID NO: 204690 - protein, 164 aa, Oryza sativa
  Clone ID: PAT_MRT4530_99752C.1.pep
MARNACRNLHGYLLRGLLQPGHELRVDLSDRPSSRRRSHREPVSMEDAVHAASLGMEPDLGGREVSTAATTLPSPRRGQIWEREGRGAASAPPPSLPLLRPDLGAGGREGELPSPLLRRGHLVRAATVAPHPPARARSGGREGEPPPPSPLLRRRRCSLFSSQI

SEQ ID NO: 204691 - protein, 121 aa, Oryza sativa
  Clone ID: PAT_MRT4530_99753C.1.pep
FLSHPQWHELGGRASLISPATTTHPSNQRRSPSPLAARLLSKILRSPNPQSPEQRRGNIARKKIGGERRRKAKDSEGSKRRERESLFHFLSFFFSPCKRQLGAAANSIHAVRRPQDEGFDA

SEQ ID NO: 204692 - protein, 61 aa, Oryza sativa
  Clone ID: PAT_MRT4530_99754C.1.pep
AQYSRLRDSTGQAPCANVRGISAINLSGLDRQSEHTSCTRVPGLRRDIPVRTVPAHALYAP

SEQ ID NO: 204693 - protein, 239 aa, Oryza sativa
  unsure (1)..(239): unsure at all Xaa locations
  Clone ID: PAT_MRT4530_99755C.1.pep
VGRRCYRHGVKERHIRFCLSTDRMHPFGEMRSGHCTWPVTMCIXNLSPXLCMKRKYIMMPIIIQGPKXPSKDIDVYLKPLVEDLKLLXRKKVVIVWNEDKYEQFNLRVLLFITINDXQSNKEYKAYTHCMDDTDSTYFEDKADHHTKPKYRNGKIVFAMVKDLTIVFGKXSGSQPIASEDGHVAMWKKKSIFXELPYWDVLXVCHAIDVMHLTKNLCVNLLGFLGVYWEVLGAFVRCHM

SEQ ID NO: 204694 - protein, 136 aa, Oryza sativa
  unsure (1)..(136): unsure at all Xaa locations
  Clone ID: PAT_MRT4530_99756C.1.pep
MRRARPRLGGGRRGNGGIARRIFPRESSXEYLFLSDEHYAYRVCNWLRRKGLMPLLKVLELPEVYMTTGKWEQMPYTRVVSVAMRQYKXYKGAFEKHDKSGVAEFLDEVRTGNARVHVGAAMPHELVAAALKHEHD

SEQ ID NO: 204695 - protein, 136 aa, Oryza sativa
  Clone ID: PAT_MRT4530_99757C.1.pep
MKETERYMYAELENQSGSGRLVSGRERAAGERYSGRAGRRRSRAAAAGEHSGGGAERSSGGIRGGAGAAGGGRGGKEDRIGELYSLVQPDGSARRHRPRSALSTTAMAPHGTRRRRREGRRPPQSSLASRRPRQAS

SEQ ID NO: 204696 - protein, 79 aa, Oryza sativa
  Clone ID: PAT_MRT4530_99758C.1.pep
MAMETTCAAGGEAAAAGSDLASAKSGWKGGDSGGMRRWEGGGGIDWWRFARSVGRKGCDSRVPPRVGGRGSDGRWPLLR

SEQ ID NO: 204697 - protein, 171 aa, Oryza sativa
  unsure (1)..(171): unsure at all Xaa locations
  Clone ID: PAT_MRT4530_99759C.1.pep
TDAAGKRDGTADGEGEAERRRSGEEGRXGRRGMSGGEGEGSGRXKAASAGVRGGREAAAAAAVGVRGXGWGAAAPTTPRRSASSSSAASGGGATSPASCRSSAAGAPRRRLLVACPXVSGADLFIGVDIDNEGEGVRLYLLRLPRWPQPCAAIADARRQRLDGGVVESIST

SEQ ID NO: 204698 - protein, 96 aa, Oryza sativa
  unsure (1)..(96): unsure at all Xaa locations
  Clone ID: PAT_MRT4530_9975C.1.pep
HLEMSDKLHQQLQQYYQALSLRLLNLLAKSLPVSLAITCCLMNSTRPSLKISSSGSPAMRVNRRSTPPHHPFVVRSQTXIREMNGPFWNHLHCQVF

SEQ ID NO: 204699 - protein, 136 aa, Oryza sativa
  unsure (1)..(136): unsure at all Xaa locations
  Clone ID: PAT_MRT4530_99760C.1.pep
LRYRLPPPPPSQLPRELRLRRRPPTPPLSQPPAVAASARAALPRRRRTPGRAPPRSPAAWASTASADGRPSACASSSVAXAATXPSERVPPVAASAPAPASAPRPPPTAASAPAHRPXAPPPSLPQPRALPPPSSP

SEQ ID NO: 204700 - protein, 106 aa, Oryza sativa
  unsure (1)..(106): unsure at all Xaa locations
  Clone ID: PAT_MRT4530_99761C.1.pep
SVVFFAGALMADMVVIFGAQLFESEMMFMDRLCQRQVLDRPLDACRQVLYRXLTARERFQPMXRRRSRSGCEMQCCQQMXDVSCLCLCTVIRRMVRCYXESMPMPL

SEQ ID NO: 204701 - protein, 130 aa, Oryza sativa
  Clone ID: PAT_MRT4530_99762C.1.pep
MVKLHGDEKVKNNQARFSCSSAVQDVMGWDEPTFKGVWFRGEWDGLVPGQEYSSQIRNQAIRKNLVDELVPPGTSARRRGGLVIGGESGGGDGGGGESGGGEGGGSESGSEEGCGGVEGSDGGDSDGGQG

SEQ ID NO: 204702 - protein, 30 aa, Oryza sativa
  Clone ID: PAT_MRT4530_99763C.1.pep
LLSFKYTHHQHIHNLGTLNLTAIPQKHLTR

SEQ ID NO: 204703 - protein, 205 aa, Oryza sativa
  unsure (1)..(205): unsure at all Xaa locations
  Clone ID: PAT_MRT4530_99764C.1.pep
MGVLAGTWYLGYRLVSRYQTLGAHETTTTTSVSPTFAGRDPHDRGVGRKGSNGSGGKNGHVRVRARRRGRFRSRSRGCRRHSSFPAGTPVPRSHGFDLHRPHRASTSGVSFLCXAPRSSTATGCPRRPSPMAAVGSPPRRRGRRQAVVVALRHRIWWLGVETERRRCQESAAARRRFQWCGMKSSKSILEAAMAKSILLCAVLFL

SEQ ID NO: 204704 - protein, 84 aa, Oryza sativa
  Clone ID: PAT_MRT4530_99765C.1.pep
FCVVLFFFFFFFFFFFFFFFFLFFFFGQGTKTLNSSPPPRGPQLGLPGPPTFIPTETRPGDHFKARKINPPAVKPASPNPYLYQ

SEQ ID NO: 204705 - protein, 90 aa, Oryza sativa
  Clone ID: PAT_MRT4530_99766C.1.pep
DIAMGSLFQAGSSFYGDYILDFNANCERCVVSLSFYKDNDEDKKETYFATGIIFASGKRSCCCLTTIDDASKRKDESCVVYFLMELQKLL

SEQ ID NO: 204706 - protein, 39 aa, Oryza sativa
  Clone ID: PAT_MRT4530_99767C.1.pep
YTGHINRVTAVSPEHIFTYQHEQRHGCYALDLIATGKTY

SEQ ID NO: 204707 - protein, 48 aa, Oryza sativa
  Clone ID: PAT_MRT4530_99768C.1.pep
MMLYSEGWSRRSNHACNAVWGISPPAKIFKAHMERKIVRYLSRKGNER

SEQ ID NO: 204708 - protein, 386 aa, Oryza sativa
  Clone ID: PAT_MRT4530_99769C.1.pep
MYRGYYTLDTFRFRAHDVKKEKDHGVSYSFILSKFNHAKRVCFRSDSDERVKELKVVVSLETIIGDANEFIKLSSTYPCLSRQPHSMYLLLDKCMFGRQMEMECVINFLLHGEITYGADHLGVLPIIGPGKVGKSTLVEHACIDERVRSHFSQIVFFSKDGLTHGNIVTLKDCGTTKHQTDDALGGSKRRLVVVELDGEIDQGLWERFYSASKSCFAYGSKIIITSRSDKIASFGTTQPHKVRAFGSSDPTENPKLASLVMDMASEKNLSIYNSTNPLDPWAVMASLYIPRANKNLDPVAILNNYQRNCNEAHNYSGLITASSPSAASQITVQDIMFGTATPLGQFKVLAWRSHIPPYYSCVFDCEIKRPPTRMVSRKKKTKKIGI

SEQ ID NO: 204709 - protein, 63 aa, Oryza sativa
  Clone ID: PAT_MRT4530_9976C.1.pep
EQMLVTGHAWHFKNYDKRPQFAKWEKMARDARQGLWAYDNPEKPWEWRKNKRKASEHHNSGVR

SEQ ID NO: 204710 - protein, 94 aa, Oryza sativa
  unsure (1)..(94): unsure at all Xaa locations
  Clone ID: PAT_MRT4530_99770C.1.pep
GEGPKRGPKRKGSQGGGSPGSPQGIQPGKGQGPPCCSGEKSLPCPRGGPNGGPPLKSPNGPGRPKNGXPPPPNEPKKTGPHPGKPQVRPEAHPP

SEQ ID NO: 204711 - protein, 66 aa, Oryza sativa
  Clone ID: PAT_MRT4530_99771C.1.pep
RKRLHHKQKAIQARMRLLCSFMTNSSLSQTDKGFSTSAMHTLVQFIFAKTSTFLAMASERFFECFR

SEQ ID NO: 204712 - protein, 542 aa, Oryza sativa
  unsure (1)..(542): unsure at all Xaa locations
  Clone ID: PAT_MRT4530_99772C.1.pep
ARPRRRRRRAAGRGAARRRRPPASPTTPPPPPPTGTGRPPPSPPPPASXTGERTVRKLRLSKALTIPEGTTVSEACRRMAARRVDAVLLTDAQGLLSGIVTDKDVATRVVAEGLRVEQTIMSKIMTRNPTYAMSDTLAIEALQKMVQGKFRHLPVVENGEVIAMLDIAKCLYDAISRLEKAAEQGSAIAAAVEGVERQLGGNFSAPYAFIETLRERMFKPSLSTIVTEGTKVAIVSPSDPVYVATQKMREFRVNSVVVATGNTLQGIFTSKDLLMRVVAQNLSPELTLVEKVMTVNPDFATLDTTILDALHIMHDGKFLHIPVLDREGQIAACLDVLQLTHAAIQLVVEGGNDTVNDVASTVMQRFWDSTLALESPDEECDSRSEVSLLLASETGDGKSSIYPPVIGNSFAFKLQDQKGRVHRFTCGSESLNELASSIKQRLSITDEEGIMQLLYEDDEGDRVLLTTDADLAGAVLHAKSSGLKVLKLHIDLSESSTEVTKPSQQLAAARRSRLSPVRVGLMAGVVALSGAAVMVYLKRAKV

SEQ ID NO: 204713 - protein, 264 aa, Oryza sativa
  Clone ID: PAT_MRT4530_99773C.1.pep
MRKEEAHALLLASSSFSGAVALHTLQQPAAAAAEGSRCRRCLSRHSSLITQSRRSRGEQVLCLSFTSDLTTGHGGDDHRYLRLSQGHHYLFRPPERDHANDALEHAPERRRFNHRRRPAILVHLGASRCAIVIVSTSSSIRLKNPSRRSARRPVRAVAVHPRRSAAVEPFQPKPLLSKLQRFLPTACYIYVPLSDIDLNLTMEINVDIKYLQNLSEQAALSLRHYKVPISFLYIQLIQVQYTFVIKLVNSSVITSDIQKCIPEK

SEQ ID NO: 204714 - protein, 27 aa, Oryza sativa
  Clone ID: PAT_MRT4530_99774C.1.pep
LACSFASSLARVGRDGDFGEVSAGCQL

SEQ ID NO: 204715 - protein, 34 aa, Oryza sativa
  Clone ID: PAT_MRT4530_99775C.1.pep
MVSGDGLRASRDEVDRQVFVVVGRVLDVVGIEGN

SEQ ID NO: 204716 - protein, 781 aa, Oryza sativa
  Clone ID: PAT_MRT4530_99776C.1.pep
MDPHPPPLSSSSQSLPPLPPSASLSGFRSTPRHYATSAECGQLEGCFAHGQEVIANEEVTSHRFTPTRMSHASSVNDSDCIRRKSMNRADALRNRSYNSEGNIQPRNPNPPLFPTPLLPGAIASSLLPPPAPPPRLASPRSSALAMAGKKRKSASSDKQPKQQQQRLPLGADADAVADAAKRRRSGASKKHQAEEEASIPSSLSAKILREALTQQQEESLADQRPAAAATAAPSPSFSFPVPKKDGEEDEDDDDVDEFDGFDAQSEYDGGVPEIDEEDEKALAAFMSKDTSSKRSLGDIILEKIREKDAEISTEGRTPVKLDSSIIELYKGVGEFLSRYTSGKIPKGFKRIPSLECWPDVLQLTEPENWSPNAVYQATRLFSSNMNAKNAVRFYEAILLPRVRNDIRKNKRLHFALYQSLKKCLYKPAAFFKGILLPLCQERNCTLREAVIIGSIISKVSIPPLHASYFIKLFLDKKYALPYRVVDAVFAHFMRFIDEERVMPVIWHQSLLAFVERRNGQQFAVDLKIRSHSSLDLGGSELQNQALPDELEFENRLLPNDYIVIWINGGDRETCGEGLRAIEDHRGRPSQSGGPNQVDFECDSESMTRAIRQWTSVAASSKNQALPDELVKQIGSCLTELRNQLLVQPCNDDWKVGNSHNKRRCLGCTLARGNSVDASTLLHHLGRRATPASPHLLVGPPTPVRHTRERSSGAPPLPSLHPLDFAAILLKLDKAKSFDSVNWPYLLDRLRDLGFGQVDKLGHLHYSKHVIQDEKGELDYSS

SEQ ID NO: 204717 - protein, 330 aa, Oryza sativa
  Clone ID: PAT_MRT4530_99777C.1.pep
MLQIILILFLTQGACSSSRDGKTSPPQGLDAGEKDIYLSHSCIHDEILHQRRRAWRKEYSVMPQVYHERRENMERLRGRHLLGVSSWHASQKNVKKPIRIYLNYDAVGHSPDRDCKTVGDIVKLGEPPVPSIPGTPVCDPHGDPPLVGDCWYNCTVEDIAGEDKKQRLRKALGQTVEWFRKALAVEPVKGNLRLSGYSACGQDGGVQLPHAYIEDGVANADLVLLVTTRPTTGNTLAWAVACERDQWGRAIAGHVNVAPRHLTAEAETLLSATLIHEVMHVLGFDPHAFTHFRDERKRRRSQVTSQILDEKLGRMVTRAVLPRVNAQNLN

SEQ ID NO: 204718 - protein, 132 aa, Oryza sativa
  unsure (1)..(132): unsure at all Xaa locations
  Clone ID: PAT_MRT4530_99778C.1.pep
HEAPGATPPAPSTRRSPRRPSRPSGASTAPSASTPRATSSSARCSTAARSPPATTRSSATASCGAPCSPERSAHDRQSXPPSASSIARPRPPTSRSPTPRTAARASPTPIAPPAASPRPASPRSRRGSAASW

SEQ ID NO: 204719 - protein, 969 aa, Oryza sativa
  Clone ID: PAT_MRT4530_99779C.1.pep
MAGKKRKSASSDKQPKQQQQRLPLGADADAVADAAKRRRSGASKKHQAEEEASIPSSLSAKILREALTQQQEESLADQRPAAAATAAPSPSFSFPVPKKDGEEDEDDDDVDEFDGFDAQSEYDGGVPEIDEEDEKALAAFMSKDTSSKRSLGDIILEKIREKDAEISTEGRTPVKLDSSIIELYKGVGEFLSRYTSGKIPKGFKLYQATRLFSSNMNAKNAVRFYEAILLPRVRNDIRKNKRLHFALYQSLKKCLYKPAAFFKGILLPLCQERNCTLREAVIIGSIISKVSIPPLHASAALMKLAEMEYCGTTSYFIKLFLDKKYALPYRVVDAVFAHFMRFIDEERVMPVIWHQSLLAFVERYKNELEKKDKEKLARLLDHQKHYLVTPEIRRELRMSCNRVSVITKPIEEDRWNVPEVPMEERNGQQFAVDLKIRSHSSLDLGGSELQNQALPDELVKQIGSYPTEFRNQLLVQVGNSHNRRRCLGSTLARGTSIDASALLHRLGRHATPTSPHLLGPAFNMIGVYAKATPSLSHVTHPCDRPAAKAFICSPTNMYSTATRYKDDQESSKVYAIRCDYHNQSNKKLFLAPTSDFRYTLGNFILATKVALLFRASTIITLGNGDLEPYLGEEDELESRTSSVQEEEDDADITLSDTHNNPPTEFENRLLPNDYIVIWINGGDRETCGEGLRAIEDHRGRPSQSGGPNQVDFECDSESMTRISFLGPYELSRSRACPYPERFFLFRHSPIRALSSLSSSSILLQTPTPVPPSHSLPAAPSIVPFYSPSPSPLHQAAAEIRQRHRGWARWRAVVVSSRLADPLCFLALPRAILLPFSSSSDGSISVDGRLRCQRSPGGTVTTAVVPLAAAYTTVSNGHCWGGDYVAFFSDEREIDQQSAVDLPIWKAGAIRQWTSVAASSKNQALPDELVKQIVEKKMKLLARLSLAYPGMMDLRWRDEQERWEEEETGI

SEQ ID NO: 204720 - protein, 141 aa, Oryza sativa
  Clone ID: PAT_MRT4530_9977C.1.pep
GTKNPHYWANKGKQKAQDFCIRTGRKKKGFFREGKKKTIFLKPKAGMAPPKVLVSKRPKRGKTETPPQNGEKKGHPLKGGGAKKKTLSNNFQKTLTPKKERRGRPLIPGKKLESLEKGGPGKTKVHQFGDFGLKNPPPRGG

SEQ ID NO: 204721 - protein, 192 aa, Oryza sativa
  unsure (1)..(192): unsure at all Xaa locations
  Clone ID: PAT_MRT4530_99780C.1.pep
MAGKKRKSASSDKQPKQQQQRLPLGADADAVADAAKRRRSGASKKHQAEEEASIPSSLSAKILREALTQQQEESLADQRPAAAATAAPSPSFSFPVPKKDGEEDEDDDDVDEFDGFDAQSEYDGGVPEIDEEDEKALAAFMSKDTSSKRSLGDIILEKIREKDAEISTEGRTPVKLDSSIIELXKGLGEFLS

SEQ ID NO: 204722 - protein, 283 aa, Oryza sativa
  unsure (1)..(283): unsure at all Xaa locations
  Clone ID: PAT_MRT4530_99781C.1.pep
IELYKGVGEFLXSRYTSGKIPKGFKRIPSLECWPDVLQLTEPENWSPNAVYQATRLFSSNMNAKNAVRFYEAILLPRVRNDIRKNKRLHFALYQSLKKCLYKPAAFFKGILLPLXCQERNCTLREAVIIGSIISKVSIPPLHASAALMKLAEMEYCGTTSYXIKLFLDKKYALPYRVVDAVFAHFMRFIDEKRVMPVIWHQCTPSXFVERYKNELEKRTRRNLHACWITQKHYLVTPEIRRELRMSCNRGEKDTIMSICSPVSVIPKPIEEDRWNVPEVPMEE

SEQ ID NO: 204723 - protein, 105 aa, Oryza sativa
  unsure (1)..(105): unsure at all Xaa locations
  Clone ID: PAT_MRT4530_99782C.1.pep
VPLPHRRPRRPSPPPPPLPPPPPCGPSXPFPKRVSQAALRERAALPPSPGAWHPARPPARIRPGPPTAGDGARPPPPSPPPPFPVVDFALTEGDGLVPLLSAAAS

SEQ ID NO: 204724 - protein, 267 aa, Oryza sativa
  Clone ID: PAT_MRT4530_99783C.1.pep
MERTASLAPATSRSVLSWRRPYPAAARPPAPLLRLDAGRLPRRRSRSSAWTPVVYLNVGRRRYSARCSSAESPPVKLRMLVPAESPIGDAPSPARRVAVRSPSRAAHSRSSACSPLPSRLPALLLRRPAESPAPLPARCRPARRGELLRRPAPPSGLSSGGSGDGECCGGGSGDGEGCGDGSGLSLSAADLADAVVAEPRLLAVKADTIARRRSAAPSCLAARRISVVEREVRAEAEVAMVIANGVVSGCKRNGFIPSHLVLEPNTR

SEQ ID NO: 204725 - protein, 102 aa, Oryza sativa
  Clone ID: PAT_MRT4530_99784C.1.pep
MAKMDGVKRRRGEEGSSKIKTKFPRQKFYRISPFGFSQSDIPFGKNMEDIPFGFSQSDIPFGKNMEGSSVVSDLAGHGFEEENYHVVDYESDLQIAMSITVR

SEQ ID NO: 204726 - protein, 96 aa, Oryza sativa
  Clone ID: PAT_MRT4530_99785C.1.pep
MKCHFASPNSTHGLQQPDSRWFPLGIAAWWFQKLACRRIGPYPATPSAGRCRDPLDTLTIRTARQPRGDGDLHRGCTSPVIASSSHPRLQEQLGSA

SEQ ID NO: 204727 - protein, 91 aa, Oryza sativa
  Clone ID: PAT_MRT4530_99786C.1.pep
MLLIICIDLPLVHDKVLVVRNTHGWHQKGGPMWEKRRRATGEHLNRIMAQQWPDSHETLSFVVDKLAICASAMWTPFPSTCVGVEYTIDQC

SEQ ID NO: 204728 - protein, 44 aa, Oryza sativa
  Clone ID: PAT_MRT4530_99787C.1.pep
VEVEKKERSERGTEPSPYMKIAKGALSLLLSKENPKFSKKQELH

SEQ ID NO: 204729 - protein, 281 aa, Oryza sativa
  Clone ID: PAT_MRT4530_99788C.1.pep
MGSNVEIEDCVTMAQFNEMKQSMEALTANVQALMNRLPEPPPEDANASHHGEEDEESEGEAAARLAREQRRRRRDRVVANARRPPHPGRGNGGRGADRGREHGLEESGTDEEVEQPHRDDRRHRGNRGRNQPNEERFGKLKFTMPKFEGGSDPEVYLTWELKVDKIFRLHNYSERKKVAGAALEFDGYALIWWEQMLNEREEAGQGDVRSWAEMKREMRARFVPKHYRRDLFDKLQNLKQGSLSVDEYYKEMEKAMIRANVYEDEEQSIARFMSGLHRNIQ

SEQ ID NO: 204730 - protein, 59 aa, Oryza sativa
  Clone ID: PAT_MRT4530_99789C.1.pep
MFPLCGCWHTAFLFSRAFVTGSLFALVILRGHRRASCVWFCSGGSPWIGFRMRVLRSIW

SEQ ID NO: 204731 - protein, 264 aa, Oryza sativa
  Clone ID: PAT_MRT4530_9978C.1.pep
MGRTPCCDREAVKRGPWSPEEDDALRDYINRHGTAGNWISLPNKAGLRRCGKSCRLRWLNYLRPDIRHGAFTDEEDAIITSLYSKLGSKWSTIAAQLERRTDNDVKNHWNTKLKRRLAAAAACTPLLPLPAPPPLAATHTSPSSSLLLLPPLAVPTVKTEAYTCDDFLQQLLPTATAATALRDPFADGAATDGGSTSASAASSGSNWSADTGVVVVGGGGGGGLFPEFCMSSDDLAGAATAEDDHFIGGGYYYPLDPSLSSSLV

SEQ ID NO: 204732 - protein, 711 aa, Oryza sativa
  unsure (1)..(711): unsure at all Xaa locations
  Clone ID: PAT_MRT4530_99790C.1.pep
MSLPKPHCKXFPRLMEADESGVPPRPVAGDVHIPASRSAKEPIFMERHGGDLLTAMASSPDTTLAFHAARPVSISLPASPTGFDVARSGVELQRHAMTDAPCMLPLPGWPAMMAVAQPDRMIFRSQPIAVLGGAAALPQQSRSSQVHDGTSRDGAPRAAAAAATTTGKARGRRDTSYDSFKTWSGKLEKQITTHLRGGRQQQQQQQPEQRRQDEEPEDDDAAAAAAAAATTASSSRSYSSMPRVQRFFAALEGPELDKLRVHHEQPSPCRLALVEQLACTLVRSRSQRAAVVVVLVSCRRQSSEALVLPSDKTWPFLLRFPVSAFGMCMGMSSQAILWKNIAISTSTRFLHITVKINLVLWCVSVALMCAVSALYACKVAFYFEAVRREYYHPVRVNFFFAPWIACLFLAIGVPPMVAASLPHWLWYLLMAPIVCLELKIYGQWISGGQRRLSRVANPSNHLSIVGNFVGALLGATMGLREGPIFFFAVGLAHYIVLFVTLYQRLPTSETLPRDLHPVFFLFVAAPSVACLAWARITGEFGYGSRVAYFIAMFLYASLAVRINLFRGFRFSLAWWAYTFSMTSAAIASIRYSSEVKNAFTQSLCIALSVLATLTVTALFLTTLLHAAVHRDLFPNDISIAITERKLKPIAEIHEQQQQQRDKNATTAADIHPDSACIKDLEAGVPPPPSYAGDRSTTTTSTDPCPLGAGQF

SEQ ID NO: 204733 - protein, 133 aa, Oryza sativa
  unsure (1)..(133): unsure at all Xaa locations
  Clone ID: PAT_MRT4530_99791C.1.pep
MSLPKPHCKVCPRFPRLMEADESGVPPRPVAEDVHIPASRXSAKEPIFMERHGGDLLTAMASSPDTTLAFHAARPVSISLPASPTGFDVARSGVELQRHAMTDAPCMLPLPGWPAMMAVAQPDRMIFRSQPIA

SEQ ID NO: 204734 - protein, 103 aa, Oryza sativa
  Clone ID: PAT_MRT4530_99792C.1.pep
MPNPGLNGGDGGLAEPPGSAEPWAGPNQPIFGWRRPLLLHSADLNRGEDGLARRDFGVARPRLGAEVVLARHAVHGSATRRCHDTKTVRRLGSAFCRTPCVRG

SEQ ID NO: 204735 - protein, 157 aa, Oryza sativa
  Clone ID: PAT_MRT4530_99793C.1.pep
KGKKKTLAQGGEKLPPRRPKPKSPGRGEQNPPPPGGGGPKQKKMPKRSGNTGEKTIGGFFYEQRETLGNPPFRQIFWEVFFLSPGGPSPGKKRVSRQKIRGPLYPTRKKGGGGGRKTSLKILPRGGGGQTGWGALAAKKTTIHGPIFIRGAPGGNTF

SEQ ID NO: 204736 - protein, 61 aa, Oryza sativa
  Clone ID: PAT_MRT4530_99794C.1.pep
MGGDLVRNEIAWGSPYASGRSSERENKIEAKSKAEIEFGNRAGIGWSPDQLRLGSAESESD

SEQ ID NO: 204737 - protein, 302 aa, Oryza sativa
  unsure (1)..(302): unsure at all Xaa locations
  Clone ID: PAT_MRT4530_99795C.1.pep
MLRNRSRRSVGAKQGGVTAMAQPEPPPPSSQSSSSSSSSSPVFPSPRPFMALPHPPQAGFLDGAAEGPSSSMSPTSILETKQFCCSSAMPPFLSERSLRKAHVEMAAAPPEPAGVGLADVLREHHGGGKAGGGKVVFGSQLRIQVPTGRAVELVSSPIEFGVKNRDAHXRRCRRRGGSCRRWSARRPRGCSPAAVVSPGEMAMSEDYTCVISRGPNPRTTHIFDDCIVESCGDVLVEKVAGGGGDGDGDAVRTNGFLNSCYACNKQLGHGNDIFIYRGDKAFCSSECRYQEMLFDEAVDNLR

SEQ ID NO: 204738 - protein, 176 aa, Oryza sativa
  unsure (1)..(176): unsure at all Xaa locations
  Clone ID: PAT_MRT4530_99796C.1.pep
RSIRASSPPPPLDPAPLRLTAAASSSSPPPPPRXDPPSPPPPPXRLSSTSPPAPPSSTXGSCRRHRDSPAGSSSLPPPPPPPPXPPPPRPPPGPPLPPPVXSSSTPPPPRPAAPPPRQSPPPGPRRPPPSPPPPGRRRRAVTRRHRHGEPTPSASPLLSSLCLTPSSPPQPRRDSS

SEQ ID NO: 204739 - protein, 199 aa, Oryza sativa
  Clone ID: PAT_MRT4530_99797C.1.pep
MDPAASGNDVAGTVGSTTTFLRSGEPSSLASADDDRSDGEEIQGGGFGGFWWVAGLGGNDGLQRPKSPQILQSQQPLDKYGGAPSSNADDRVRPRGRQVLSPLPSELANYQFLNSLMLSEKSFFDQDFESLCAHAGPSAAGLHVSQSLIKKATIVTGNGEEGGGRGRPSLAYLGHIISAEGFPTYPEKIQVVKEWPTHV

SEQ ID NO: 204740 - protein, 60 aa, Oryza sativa
  unsure (1)..(60): unsure at all Xaa locations
  Clone ID: PAT_MRT4530_99798C.1.pep
HXNHLPCLRRTASCPAPPPPPNPPPPAATPPPLPLRSHHRSLHPCLPEATSDAGRPGFGR

SEQ ID NO: 204741 - protein, 204 aa, Oryza sativa
  Clone ID: PAT_MRT4530_99799C.1.pep
MDQLQIEAQPTSLAHLNCPDEEKRGETLAPPVDSAASNNMRVRSAVREKRSWATPKEIAPNFDLNSRTRRDLRHHDKRMPRPPVALVNRAAIRRLALLQPSPCCVAIEVELTVVFSDSVEGANSDGTIARPSGEAEPIPPYGRRNDVKEVVGDGLPWSGVTADYCHHPCRLKTRPRGRKDATCQYDDSASSRKAAGSADWAAKA

SEQ ID NO: 204742 - protein, 164 aa, Oryza sativa
  Clone ID: PAT_MRT4530_9979C.1.pep
TFFVIRQVLVRRELDLSAKELQEQVRSGDASATEYFELGAVMLRRKFYPAAIKYLQQAIQKWDRDEQDLAQVYNALGVSYKRDNKLDKSIQQFEKAVELQPGYVTAWNNLGDAYEQKKDLKSALKAFEEVLLFDPNNTVARPRRDDLKQRVGMYKGVPVKSEKR

SEQ ID NO: 204743 - protein, 73 aa, Oryza sativa
  unsure (1)..(73): unsure at all Xaa locations
  Clone ID: PAT_MRT4530_997C.1.pep
CEGVDERVGGKAVKYKSSLNALKQIVEKEGRKXLFKGVGDNIIATCLPEACVLSGYVKLQVVVFGKKFGFGGG

SEQ ID NO: 204744 - protein, 54 aa, Oryza sativa
  Clone ID: PAT_MRT4530_99800C.1.pep
MSSSAASTRFIKCVTVGDGAVGKTRMLICYSCNKFLTDYILTLFYIFSANVSVD

SEQ ID NO: 204745 - protein, 172 aa, Oryza sativa
  Clone ID: PAT_MRT4530_99801C.1.pep
RPPTCVRRAPAGSRVRQRRRRRRVRPPRRRWPGRRRRAARWASSDAVSCRGRAPTGWSVGSYRRRLRLHLAAWWRDRGRSRTGRRSRRGWRTSSRRHRRRRRRRRIRASRRRRRGRRGARRGRPGTASSGGCRRRRRPWRPGGPRRGPCAPTGRRSGTAAPPRSGRRTARRG

SEQ ID NO: 204746 - protein, 99 aa, Oryza sativa
  Clone ID: PAT_MRT4530_99802C.1.pep
GKDKPFSVKKLLVPPFLNLTPKTGKNAFPIKSPNGGQKQIFGSPNPGLFFYFPGLKKFPSTFSPLFDLENPRPFFFKKKSPSILLPGGLGSLFKGGVSL

SEQ ID NO: 204747 - protein, 348 aa, Oryza sativa
  Clone ID: PAT_MRT4530_99803C.1.pep
MATREGGGRGGGRPPLRVGRTQEYRMGRETQLLAAEGSPPVSLFVLCGDRFEAARLFRSGGLSVRMARVEGHPVSMASCAVGNHHWMLSRDALVARLDARVFVFEMPGFFYAVVGGGGAERKCATLAEIFSRFCSYHDLSTTQQDRISALPDEVLRLVLLLLPAHEAVATCVLARRWLHHWEEAPGLSIDWWGYQELDRFISFVDRVFTLRSYNAPLNHCHFYMYFLRLVPGRERLFVRWIRQALRCQARVLRICLILRGCEDEAGGDMNQHSNPWVRAHGRIQRLKKPTSPPAGAGQATADAAAERAGAGAVVGLASQLERAVRTLAGVKLVSRFLLAGAAQAGAPT

SEQ ID NO: 204748 - protein, 364 aa, Oryza sativa
  unsure (1)..(364): unsure at all Xaa locations
  Clone ID: PAT_MRT4530_99804C.1.pep
MALLPLLLLLLLRIVASAPASPPATALFVLGDSTASCAATTLPLNLSLTSSSGTCLFPSAHRLLPDLLAAKMGLPPPPLISTLNGTAAEVARGVNFAGEDGGRGAIFRLGAVGQQLRLATETLQLLRLEAPTPQDADAAAARAVFVLSFGTDAYARVLSRGAGADASAPKHGRRGLARLLADRVARAVEELYEAGARRTAVMGVAPLGCAPRVMWEGLHVVDGRSCVEEANELVQGYSARVAARLAALRPRLPGADIVFCDIYKGIMDIITHPARYGNQDWSKFNNSIANYXGTVGCLTKEMVCPTPQRHVWWDLYSPTEVVTSLLANWSWSAPSHSNTTICRPITLEMLTGHISLISPSMSEL

SEQ ID NO: 204749 - protein, 177 aa, Oryza sativa
  Clone ID: PAT_MRT4530_99805C.1.pep
MESCPSVKNILLLDSEGKRVAVKYYTDDWPTLSAKLAFEKSVFVKTQKATAGAEAEIVMFDGHIVVYKFIQDLHFFVTGGEEENELILASVLQGFTDAVDIILRNNVDKRTALENLDLILLCLDEIVDGGIVLETEGSVIAEKVSAHGIEGATSLAEQTIVQALTTAREHLTKSLLM

SEQ ID NO: 204750 - protein, 82 aa, Oryza sativa
  Clone ID: PAT_MRT4530_99806C.1.pep
SDSKLSQRRLVETYIPGALITGASARSSILQRIRVTTTHGRTPLAAAPSHNTKWPCAGTERPAPLYKRGSRIESESNSKYNT

SEQ ID NO: 204751 - protein, 76 aa, Oryza sativa
  unsure (1)..(76): unsure at all Xaa locations
  Clone ID: PAT_MRT4530_99807C.1.pep
MVDTTKTHKYFKEKTHPACEETHLRPIRHKHIDWRAHKAHQSVSLSKERPGGGAXMGSAEPPQPPLILTFDVYAPV

SEQ ID NO: 204752 - protein, 86 aa, Oryza sativa
  Clone ID: PAT_MRT4530_99808C.1.pep
MAEWSGDGGRPVMEQSRRGPAALCAKSSPSSDSLGEQRRWAEWLGAGAAGSVKQRRWVAGAVGSGEAAAVGSVGLGSGGGERLGGR

SEQ ID NO: 204753 - protein, 62 aa, Oryza sativa
  Clone ID: PAT_MRT4530_99809C.1.pep
TICNVVSFDILFLSLYELSLQLEVRSENQVACHRKQDRRKHSLTPGNAVPILETWVFSFPPL

SEQ ID NO: 204754 - protein, 50 aa, Oryza sativa
  Clone ID: PAT_MRT4530_9980C.1.pep
VDRLVHLFRYVPREQLTIPDFVFQHDLEVNGGRGLIVDPRTKHIYQRPSG

SEQ ID NO: 204755 - protein, 111 aa, Oryza sativa
  Clone ID: PAT_MRT4530_99810C.1.pep
MVIEVFGRTRKRQHQYGKATDVRRTKKRPENGGEESSMNIWKKGLIRGGGVRKGKKKRKGRVTDRWVHKKLKAFTSHHQSTTRACMPTDGPSSPLAHDNRTRDGDEKERDQ

SEQ ID NO: 204756 - protein, 75 aa, Oryza sativa
  Clone ID: PAT_MRT4530_99811C.1.pep
ASLLVLEINRDKALFPFRSGFFFCRGLSTWRREGPVGMPWNISMIRRGEQLIRSTPAPGWVARPGNRQEHWEGHV

SEQ ID NO: 204757 - protein, 47 aa, Oryza sativa
  Clone ID: PAT_MRT4530_99812C.1.pep
LVSLLACLRAEQYTCLYVGQHTIISLYTCTGFLFIGLINRYVRSFRT

SEQ ID NO: 204758 - protein, 153 aa, Oryza sativa
  Clone ID: PAT_MRT4530_99813C.1.pep
RPGPHASVAKKRRTTSDCHPPACTHPSETSSESHAISRFLPPRRASSAGSSASRRILLGITHLRASFRRCERCPQFFLRILANPPRNRAPPCAIPRFISPLHTPSVDFLYNSAIPRLILPAHMPSAISSTIQQFQLISSAPLLLPPQLILLQV

SEQ ID NO: 204759 - protein, 183 aa, Oryza sativa
  Clone ID: PAT_MRT4530_99814C.1.pep
MELPAAKRQFSTTSQGKEVSGISSCKPTYQRYQSCPPEVYRRQASSYSVPSSEISRSSVRSSGSFRAAAQSLAGVFSCFVPRKSRNEDELEISRTTISQGSRSTGYQVSIDPAGTGYPQESTELTVAEIFKATSNFSDKNIIKQGSYSSIYRGKLRDGSEIAIKCARKLNSQYASAELRRELE

SEQ ID NO: 204760 - protein, 66 aa, Oryza sativa
  unsure (1)..(66): unsure at all Xaa locations
  Clone ID: PAT_MRT4530_99815C.1.pep
GRNGCNPSAGXENPRYQLLCQLDISGPRAVWTVCXLAPVPSFRGKADANSFCLHNLFQLGKHNFPY

SEQ ID NO: 204761 - protein, 395 aa, Oryza sativa
  unsure (1)..(395): unsure at all Xaa locations
  Clone ID: PAT_MRT4530_99816C.1.pep
MASETLQTLLPPPPAEEAPTTTVAALTDDTLRNILHRLAPADLLRAALACHRWRRAAARCAKGAPPPLLGYFFHPADTPPPVHLPFSASRGRLHPAAVSPVDXLLLLLPAPLPRLPRRDQGLHHLRRLPRPRAPPPDLAPPPRDALPGDRWRGRRHIVGAAVLSRAXHPSRLCFDAVCLTVDDKHPRAWVASYRDGECSWRALPRDTGVTVAFDPYWFEGRCVHAAGDIYWHICHSGRLLKLDPATLSFSYLLAPSELGDSNKKFRIGETPEDGRLGMATVEDQEMQFWVRGEASGSDNGWFLRKRMNMRKVLDTIPGLPRDMMSRIISIWLSDIDSGRTGKLFIKTQGYGRYSFHMDTGKLDRLATEDGKEYGHPIYAYYVAWPPAFLAPELEV

SEQ ID NO: 204762 - protein, 488 aa, Oryza sativa
  Clone ID: PAT_MRT4530_99817C.1.pep
MELPAAKRQFSTTSQGKEVSGISSCKPTYQRYQSCPPEVYRRQASSYSVPSSEISRSSVRSSGSFRAAAQSLAGVFSCFVPRKSRNEDELEISRTTISQGSRSTGYQVSIDPALDKHEYPPPCENQNGEMTNLSAAGTGYPQESTELTVAEIFKATSNFSDKNIIKQGSYSSIYRGKLRDGSEIAIKCARKVWKQREYAYSAIFHELNSQYASAELRRELEILQKIDHKNLVRFLGFFEREDESLTVVEYVSNGSLREHLDESCGNGLELAQRLNIAIDVAHAITYLHEFKEQRIIHRNVRSSNVLLTDTLTAKLAGVGLARMAGGESSESEDTQGKSAAGYVDPEYLSTYELTDKSDVYSFGVLLVELVTGRPPIERRRDLDPRPTTKWALQRFRGGEVVVAMDPRIRRSPASVATVEKVIELAEQCVAPPRKERPSMRRWTEALWSVRRAYHRRQDAPAGAAAVAAAPTQDRSSDCVKVEFNHNHS

SEQ ID NO: 204763 - protein, 75 aa, Oryza sativa
  Clone ID: PAT_MRT4530_99818C.1.pep
MTHLGNLTEITQIDLSYNMFNGNIPDVFGKLSSLQSLNLASNQLNGTLPLSLSTCPMLRVVSVRNNSLSGEITID

SEQ ID NO: 204764 - protein, 85 aa, Oryza sativa
  Clone ID: PAT_MRT4530_99819C.1.pep
GYTVRSIHSFILLPIVQQRYLQHVINCIIKFCSQHVTVSKRSYKRAFTRRKIQSALSNGDDGSLLLIDKPPQWVYVGIQADLYML

SEQ ID NO: 204765 - protein, 59 aa, Oryza sativa
  Clone ID: PAT_MRT4530_9981C.1.pep
HRVFPCNEIIPFLMKRINVFAHEENTNGCNCGMIYNKKMVVIAACLPTSSTVVCAFFRD

SEQ ID NO: 204766 - protein, 121 aa, Oryza sativa
  unsure (1)..(121): unsure at all Xaa locations
  Clone ID: PAT_MRT4530_99820C.1.pep
HVPNPMREAPNNFPVRVDRPLEKKFSRKKMVQVSCTRILRPPKNGASIVSPRSRAVFFVHHGFLKEVVYPSXSPLKKSVRYHLDGIPKPKFFLDPKDPFYAEDQPNPFFWVTECQRGKPVV

SEQ ID NO: 204767 - protein, 360 aa, Oryza sativa
  Clone ID: PAT_MRT4530_99821C.1.pep
MEVTPNHTQTVSGWAAMDESGKIVPFVFKRRENGVDDVTIKVKYCGMCHTDLHFIHNDWGITMYPVVPGHEITGVVTKVGTNVAGFKVGDRVGVGCIAASCLDCEHCRRSEENYCDKVALTYNGIFWDGSITYGGYSGMLVAHKRFVVRIPDTLPLDAAAPLLCAGITVYSPMKQHGMLQADAAGRRLGVVGLGGLGHVAVKFGKAFGLHVTVISTSPAKEREARENLKADNFVVSTDQKQMQAMTRSLDYIIDTVAATHSLGPILELLKVNGKLVLVGAPEKPVELPSFPLIFGKRTVSGSMTGGMKETQEMMDICGEHNITCDIEIVSTDRINDALARLARNDVRYRFVINVGGDSKL

SEQ ID NO: 204768 - protein, 394 aa, Oryza sativa
  Clone ID: PAT_MRT4530_99822C.1.pep
MGEPPGKTGRRDAGGTAPAVEDRWTQLPPELLPLICKKLPDSADFVRFRTVCSAWRDAAPLSDVPPQLPWVVERRGSAFQARAHFRFYSPSSGRTYGVRGYGGRSWLVMGGACQEHLVTTVDLSTTALYNPLTGERLALPPAPYPQWRHGVVHVVAAGRRRGGAPLVVNASTRTGHFGYCRQGDTKWTLVDGRQDMGHRAYHGGRFYVNTNAQETLVIDASTGAVESVLPPPPRSADAGAGVSCGDYLVESRGKLIRAVLFPRDGVVTTSAEDYYLNVYQLQEDGKAAAAWAKVESVGDSVLFFDKHGHGFSLEPNGAAELKRDCVYFMHEKRTWLDAGEYRFLCRYNMETGEVDRVVSLPDTFGDTWVVPGLKATTVWAKVGSIEDRVLFLDK

SEQ ID NO: 204769 - protein, 189 aa, Oryza sativa
  unsure (1)..(189): unsure at all Xaa locations
  Clone ID: PAT_MRT4530_99823C.1.pep
KKKKKKKKKKRKKKKKKKKKKKKKKKKKKKKKKKKKKKKGRALLGVPNFPSPSLPRLAFFLGAPNFISLPVFFHRRVWKTPGVPHFNRFAPHPLFPGWVFSKGARPVPLSHHLPTLIGNGAPPFTGPLTPGVLVFPPRVPFPFASPLAPVPFVFFLSFFARFAGFPLXVLIGGLLLGSRFGVLRPLAPK

SEQ ID NO: 204770 - protein, 57 aa, Oryza sativa
  unsure (1)..(57): unsure at all Xaa locations
  Clone ID: PAT_MRT4530_99824C.1.pep
YMVLPVIHTLCLEVRATASYRSVVRCSSLSSFISLKYIYSRLIVCYCQATKXGKPCQ

SEQ ID NO: 204771 - protein, 524 aa, Oryza sativa
  Clone ID: PAT_MRT4530_99825C.1.pep
MACTAARMFASNATLCACEPGFYLSAAINGTCLGLPDGGWQVGSVGASRNQSFYFLTPVLSLDVVRRLTQSQALLLEATIAALLSWLAFCAFARFTGHDPTGNKRLFRARFWVSRLDCIYDTTHWADDQQVLRKRKTELGGTCSVASLILFVGLVTVLLYQAIQRRNIEVHRVKPANAPDLLSFVNDIEFHITTISSMSCSQLVAPSTIAMGTPGSMDFRLLPLSTLLTYNCQNTSQGPSVSLKCNGCRIPPRDHYVSWQFIDLPRQPAAAVGFQFNLTAKQHGDDKHVSSVSGTINSDNFTDDKLKTFRGRDSNVLKIQLFPQTYINHHNLKLLQPLVQDFTQGSTFSNVRNLNASLQNPMDGIINTTLYISYLSNYIVEISNENVLGPVSILASIGGLYAFSVAIFLCLMAQCEARIKKLRDEDSRMLKILRKRRAQQNWDKVRKFVMYTWGPSNLDPSDRSGKWPESSVMDSLHGSFHKKRKPIRRATSNGNKPKRNPADAGVIDIERVGEMQESSSSRQA

SEQ ID NO: 204772 - protein, 45 aa, Oryza sativa
  unsure (1)..(45): unsure at all Xaa locations
  Clone ID: PAT_MRT4530_99826C.1.pep
MSVAQDEIQTTLSNPTKEIIDLSKKISSLMMNNDDWSXLLKLADA

SEQ ID NO: 204773 - protein, 582 aa, Oryza sativa
  Clone ID: PAT_MRT4530_99827C.1.pep
MDPEAEEAQLRLEMELAKKAKADMSGLQRSSSLGLDHAGLYPLPLPPGWRSAPTSPLRTPSSPPPLQFPPAWAADVAGTSGSAAPEDDGPARNAGADEATAGSAPKNEDPARAAGADDGPTRSDYAAMMRMALAKFQDDDAAADDEEAASAVMEQAMTGLMDLTYRKAKPPELPYEFATRWPIPIAHDGTLQAEVMRDPVILPSGYSVDQTYQNNQKRQNPWTNTSTFTDHSLPYSLSVPNHLLRDMISAWCLDHSDLSPSTTSDTPSTPLEPSEEEQIQRILKLFSGNSASQREALKLIQLLTKTTKGVQPCLAKYADIIPVLINLRRKYKSSWTQDLEEERLTIILNLTMHRQNREILAGQNELAGAIKKIVKKAGNRGKRTSSLAKKRMLDAGGMKMLRGMLKIKDTEVITEAATAILALYADGEGEQPARFHEVPQMLLECHMFTDGILLLLDRLPKSPRVFRKICDQALQLVNIVMAEDASGPVTRKGILSAISLIYEIVERDVGKMNAVKNMEDFIERLRQLSSDRLPMQKMLQVERIIRTLSDAFPAPTISKGSRFYFCSLNFLEKFEFVDCAAM

SEQ ID NO: 204774 - protein, 597 aa, Oryza sativa
  Clone ID: PAT_MRT4530_99828C.1.pep
MDPEAEEAQLRLEMELAKKAKADMSGLQRSSSLGLDHAGLYPLPLPPGWRSAPTSPLRTPSSPPPLQFPPAWAADVAGTSGSAAPEDDGPARNAGADEATAGSAPKNEDPARAAGADDGPTRSDYAAMMRMALAKFQDDDAAADDEEAASAVMEQAMTGLMDLTYRKAKPPELPYEFATRWPIPIAHDGTLQAEVMRDPVILPSGYSVDQTYQNNQKRQNPWTNTSTFTDHSLPYSLSVPNHLLRDMISAWCLDHSDLSPSTTSDTPSTPLEPSEEEQIQRILKLFSGNSASQREALKLIQLLTKTTKGVQPCLAKYADIIPVLINLRRKYKSSWTQDLEEERLTIILNLTMHRQNREILAGQNELAGAIKKIVKKAGNRGKRTSSLAKVASIVAVLSEFDMFRKRMLDAGGMKMLRGMLKIKDTEVITEAATAILALYADGEGEQPARFHEVPQMLLECHMFTDGILLLLDRLPKSPRVFRKICDQALQLVNIVMAEDASGPVTRKGILSAISLIYEIVERDVGKMNAVKNMEDFIERLRQLSSDRLPMQKMLQVERIIRTLSDAFPAPTISKGSRFYFCSLNFLEKFEFVDCAAM

SEQ ID NO: 204775 - protein, 195 aa, Oryza sativa
  Clone ID: PAT_MRT4530_99829C.1.pep
MATRSKRRRLRVDDDGDALARNGGNGGVDEMLLLLAIPMVATVTEDDDCNGGAVRLDRRWQLRTSGRRSRRRSGDLRWKRRTGRGRRRLGEPGDGFPERRRRLEQRRDTAGLMAATAAQELSRLGRYERRRAKARVAAERGYPGDPFIEARRRRRRPTATGGEKERLGFGRERGIRFEIESGTFQTKLVDASKRE

SEQ ID NO: 204776 - protein, 194 aa, Oryza sativa
  Clone ID: PAT_MRT4530_9982C.1.pep
MPGYYDIDDILMEEEPISVVFQVSANGVGLLDPGAERNSVEKGAKVDLPFWLAHGLLSLEQAVSINVPPCFTQKTRKEIQADAACVDLRIRCPYFYELGCKIVPLVNDRSIGLFLRYAFTSRYKEILSKSHSSSMMTVPKFVPRLTKEEAQVFESARDSMTAFKKWRAGGVRLQKASILGRKRKTKLPDGPSAP

SEQ ID NO: 204777 - protein, 120 aa, Oryza sativa
  Clone ID: PAT_MRT4530_99830C.1.pep
MAGGELDDRCHAGFVPHGSRSVPPRRMSHALRDESGPPPQIYDYRVRRRYVPLMGVTMADSGPPWKAPCERWRRPPLPRSVYGPSAVACSTWQARTVGSRLPRLVQMARASDRAWLADRS

SEQ ID NO: 204778 - protein, 116 aa, Oryza sativa
  unsure (1)..(116): unsure at all Xaa locations
  Clone ID: PAT_MRT4530_99831C.1.pep
HRRLLPTPPLRVVPPSHRLLWPLPSSPPPPAGAXPPPPPGPRLLAIHEQEFRQVRAGAVTPPHIETRCPXPGSPPPPRPSSLPPSTPIAPSSPPAPSAAIFKRYRSPPPTPSLSSS

SEQ ID NO: 204779 - protein, 69 aa, Oryza sativa
  Clone ID: PAT_MRT4530_99832C.1.pep
ILFLLGTLLRWYDVGTAMEAELQVVYHVFIGEIGLKLQLWKFNMLTTDYGPVDLVLYHMFFTSPKVKTG

SEQ ID NO: 204780 - protein, 68 aa, Oryza sativa
  Clone ID: PAT_MRT4530_99833C.1.pep
MAPLPPSQKAILHYAGDRLLKGRQDEYNEKSEREKEFYIPQGHKIALTEDCKGAAYRMTGRPRCPFAG

SEQ ID NO: 204781 - protein, 73 aa, Oryza sativa
  Clone ID: PAT_MRT4530_99834C.1.pep
PPCCPLPQPPPHCTVLPPSPTSASHPHPQYLVRRPHPQPPPHRVALPLPPTSVVSPLPPISTVPSLPPISSAP

SEQ ID NO: 204782 - protein, 406 aa, Oryza sativa
  Clone ID: PAT_MRT4530_99835C.1.pep
MQESREYWRDGGDVVGEELLREILDETAAVHSNSNSNSNSNSNSKEAEEEDEREYFAAAAADEQLQVEAPCGRRRRESMVNKLISTVYSGPTISDIESALSFTAAGDHQLLADGHNFAASSCSPVVFSPEKTLSKTMENKYTLKMKSCGNNGGLADDGYKWRKYGQKSIKNSPNPRSYYRCTNPRCNAKKQVERAVDEPDTLIVTYEGLHLHYTYSHFLHSTSSSSSSTTTQQQLQPQPQMMTNCKKKPKLHLHPLLHDDPPPPPPPPEMTTMMIMQSFSIQQQQHDDDQLLQPAADDHLMVQAPPDDCYNINGSSSSGLMMSLDDDEQAAGAGGLLEDVVPLLVRRPPPPICNNNNYYYSPATTCTSDNEYGSSASASPSSSVSVSSWTTPMSPCIDMAILSNIF

SEQ ID NO: 204783 - protein, 310 aa, Oryza sativa
  unsure (1)..(310): unsure at all Xaa locations
  Clone ID: PAT_MRT4530_99836C.1.pep
MGDASASTSAPATPTSTLICREDGNDLFSADPADDDGGGGSGGDWELSIADDDHVLLMDRDDEYLALMLSKERCAGGGGGGERGDEEEEEMVEEWMKNARASSALCWLQTNAGFRFSLKTAYVAVTYLDRFLARRCVDRDKEWALQLLSVACLSLAAKVEERRPPRLPEFKLDMYDCASLMRMELLVLTTLKWQMITETPFSYLNCFTAKFRHDERKAIVLRAIECIFASIKVISSVGYQPSTIALAAILIARNKETAPNLDELKSVVGSLWQQIDTGHVYSCYTKMMIQEDRSMQSTTGXVASSGVSVA

SEQ ID NO: 204784 - protein, 164 aa, Oryza sativa
  Clone ID: PAT_MRT4530_99837C.1.pep
LRVLAGHSSPASVAASASSSTRKVGADLPSSSFSFSSLRGRGFRGVRVWSRLPPGDACSGGWEGWCPRRFGRRRRSGGRGRVARGGAAACPLSRKLSAGLFGFSADALVRRILFCVVFSLQMEPWRWQICLVTPRSFLFQAFVRTGFRAMRVSSASSTPPPPAF

SEQ ID NO: 204785 - protein, 342 aa, Oryza sativa
  Clone ID: PAT_MRT4530_99838C.1.pep
MGDASASTSAPATPTSTLICREDGNDLFSADPADDDGGGGSGGDWELSIADDDHVLLMDRDDEYLALMLSKERCAGGGGGGERGDEEEEEMVEEWMKNARAWCVGWIVKRDKEWALQLLSVACLSLAAKVEERRPPRLPEFKLDMYDCASLMRMELLVLTTLKWQMITETPFSYLNCFTAKFRHDERKAIVLRAIECIFASIKGRSFPPSAFISPNRIARISFHFRNLVVISSVGYQPSTIALAAILIARNKETAPNLDELKSVVGSLWQQLDTGHVYSCYNKMMIQEDRSMQSTTEVASSGVSVAHIGGSEDSAMGGANNATTLEATPDKKRKRLHSPQRQ

SEQ ID NO: 204786 - protein, 39 aa, Oryza sativa
  Clone ID: PAT_MRT4530_99839C.1.pep
MMTSMSKSARGATREKSCEEKIPSATGGQAKQFRVVKFC

SEQ ID NO: 204787 - protein, 179 aa, Oryza sativa
  Clone ID: PAT_MRT4530_9983C.1.pep
MKLTEANKKSALFGEQKQNMAKQRHPCMGELPQQQSNSSDRWGPSVSESCTIFFLGQGRPPTAGAHVEHGDASTSARTHVLHHKDDVLCFARGSRVFSTEMGDQSDVPGSCLMDRNNKIQWPPHMENFFPGKDEPSRNSDRWRRGAQAGAAAGEGRSGGSRRELKRQRRRARADANEIE

SEQ ID NO: 204788 - protein, 1064 aa, Oryza sativa
  Clone ID: PAT_MRT4530_99840C.1.pep
MGSLEDGGGVGAGAGAGAGGYKRGHPPPPSPLLRSVVGPTRRGSARSRLARFLLFEKVDYLQWIGTAAAFFFVTILVVAFLPGSAVFERPTMLLPSRRAGGGRGGGAEALLPRGLGVVETGEGVAFEPTRLRERWARERREEADGLAKLGNPVRRFGVRKPRLAMVFGDLSPGAMQLQMVSVASVLEAMGYEMKVFTFKDGPCTNIWRTIGVTVDLLPEDTDLHISVDWLDYDGILVNSIEARPEPFKSIPVIWNVQESSLAHRISEYNSSGMIQILDGWKEAFSRANVIVFPNYVLPVMYAAFDSGNYFVIPGSPAVPFQDRISAKSYDQDVRVSMGLSPSDFVISIVGSQFSYGGFLMEEALVLQAVGSLLQQYPSENSTQLELKVRILAENVTEKHRMALEAVSLNVGFPRGAVEHVASEDKDNLLGISDLVIYGSCLNEQSFPSVLVQAMCLEKLVIAPDLEIIRKYIDDGMNALLFPSKNIGKLTQVLLQAVSNGKISVLGQKIASAGKVHAKNLMASETIEGYAVLLENVIKFPAEVLTPLTAGEIPVALKQEWKWHLFEDVKHLYHMNGTLAGYNILQKLEEKWRSNQMEDHHSNASKIDDTFSLMAWEEERADEIANIKKRLEEEEFWKEHLQVSGWIDIMQLKERSEQPHGTWEEVYRNVKRVERMKNDLHERDDKELERTGQPLSIYEPFFGEGTWPFLHRSSLYRGIGLSSKGRRPGADDIDASSRLPLLNNGYYRDILGEFGAFFALANRIDRIHKNSWIGFQSWRVTARKANLSKKAETALLEAIQTQKHGDAFYFWVRMDQDERNLASQDFWSFCDAINAGNCRSAVLKAFQRMYGVQLDDDLHTLPLMPNDGDTWSVMQSWVLPTRSFLEFVMFSRMFVDALDAQMYDKHHETGHCILSLHRDQHCYSRVLELIVNVWAFHSSRRMVYVDPETGAMQEQHLLNGRRGQMSIQWFSLATLKSMDEDLAEEFDEDHPDRRWLWPKTGEVFWQGVYERERNMRQQEKERRKQQSKDKIQRIKKRARQKTLGRYIKPPPEDAGSLNDTRTVDR

SEQ ID NO: 204789 - protein, 66 aa, Oryza sativa
  unsure (1)..(66): unsure at all Xaa locations
  Clone ID: PAT_MRT4530_99841C.1.pep
MEQIQGEMEMQCXDECRLVLVPLSLVAARKPLAXFXFLMCXFIKMFKQKQGVRCQERAIQAPXRAP

SEQ ID NO: 204790 - protein, 66 aa, Oryza sativa
  Clone ID: PAT_MRT4530_99842C.1.pep
MGKRLKGLTLGNGGGPSQGMATQYNIGKNKRGPGPPFGGNIRDQLCPRKGHNKGSWAPKRPESPED

SEQ ID NO: 204791 - protein, 50 aa, Oryza sativa
  Clone ID: PAT_MRT4530_99843C.1.pep
NHYCKNMIFFLIFLESTTPTGSLSRPTKPMFPPTPKTNVTWPWPLNSIPT

SEQ ID NO: 204792 - protein, 79 aa, Oryza sativa
  unsure (1)..(79): unsure at all Xaa locations
  Clone ID: PAT_MRT4530_99844C.1.pep
LPTLARPQDGEDPIYRLLWKYKVQLTXXKFSSGMSVIVVPAHAVMHWXHIGQIAFPVQTVGGHMILSSPAVNLSRKQHA

SEQ ID NO: 204793 - protein, 58 aa, Oryza sativa
  Clone ID: PAT_MRT4530_99845C.1.pep
MAVAGGSARDEAPSRGGRRRGRMSWACIGGGNATPEEGERGSGGAAAAAPPGVGSESA

SEQ ID NO: 204794 - protein, 242 aa, Oryza sativa
  Clone ID: PAT_MRT4530_99846C.1.pep
MASHQRSASLPSRLHSTESNVEEELHGLRSCISSPSATIGTMCDGLRRLGEVYNSIEEIMFLPSNQAGISLHQQRKMVEEELDMSLLLIDLCNAMQESLSEMKMSIHELQLLLKRGDSVAVHNKIESFVRLAKKAQKMPFKKTSIGAISESCKMIRLLGEAREMAVSVLESTSLLLPKQIAKNSASKWSLVSKRFQRRNVVVCEEQQLQELEHSMGDLEDGAEFLFRRLIQIRVSLLNILSS

SEQ ID NO: 204795 - protein, 638 aa, Oryza sativa
  Clone ID: PAT_MRT4530_99847C.1.pep
RERLWRPAGARRQAAAATVTAAVVVAAAMLPDLAADTAALLAFRDAVGPRLPWASSSSSPCGWRGVRCDAGGGRVVALQLPGAKLVGRVPTGTVGNLTALRTLSLRSNALSGGIPVDIGNCGELRALYLQGNQLAGEVPEGFFSLLLLQRLDLSRNRITGSISPEFNKLRRLATLYLENNGLNGTLPADLDLPKLQLFNVSNNDQLTGAVPASLAGKPASAFSGTGLCGGPLSPCTNTSPPSPSPSPSPPIPPPPAASQDSKSSKLSGGAIAGIAVGAAAALLVALAVIVLLCFKRGRRKEGRPADVDEDASPVSVTVARTDKVEVKRSRSRPSQQTTTASGAKKLVFVGGEPDVPYDLDTLLHASAEVLGKGWLGTTYRATLEGGAAVVAVKRLREAPIAEREFRDSVAELAALRHENLAPLRAYFYSRDEKLLVSDFVGAGALSSLLHGGGGAVRRARLGFTSRARIALAAARGVAFIHGAGSSHGNIKSSNIVVNRTHDGAYVTDHGLAQLLGAAVPLKRVTGYRAPEVSDLRRASREADVYSFGVVLLEMLTGRPPANAVPGFDGVDLPQWVRAVVHEEWTAEVFDASIADEAHAEEEMMRLLKLAVECTEQRPERRPTMAEVAARIEHIYTSI

SEQ ID NO: 204796 - protein, 81 aa, Oryza sativa
  Clone ID: PAT_MRT4530_99848C.1.pep
LFIKLRFIFGSKHASSFFLIMVSGPIRYRFCGTKLQIPYLQFFMIGISFFFLRHVQLHVSVHLSTFHFKNIIYPYFNVPIY

SEQ ID NO: 204797 - protein, 93 aa, Oryza sativa
  unsure (1)..(93): unsure at all Xaa locations
  Clone ID: PAT_MRT4530_99849C.1.pep
MFCKAIKLGNARGEFKLGTPISSRGHHNDMXQTADLVHQSSMDAASSLLVTALNEGRDVIMDGTMSWEPFVQQTITMARAVHRQRYRMGVGYK

SEQ ID NO: 204798 - protein, 216 aa, Oryza sativa
  Clone ID: PAT_MRT4530_9984C.1.pep
GGARPAGLWPLLGAMPGYYDIDDILMEEEPISVVFQVSANGVGLLDPGAERNSVSDFCTYGLVLWYLQVEKGAKVDLPFWLAHGLLSLEQAVSINVPPCFTQKTRKEIQADAACVDLRIRCPYFYELGCKIVPLVNDRSIGLFLRYAFTSRYKEILSKSHSSSMMTVPKFVPRLTKEEAQVFESARDSMTAFKKWRAGGVRLQKASILGRKRKTKL

SEQ ID NO: 204799 - protein, 122 aa, Oryza sativa
  Clone ID: PAT_MRT4530_99850C.1.pep
MAGLGTALGPPLLQRRRMTGPGVQLAGPGAAPSSSASYLNDIGGSSRWGSEKTAATVAFEWDSSGVVQHRQVTAVGDDDLSRIKAVHITVPGSVALTGGSLPSGCGDRGVDAKNTHWPGRSA

SEQ ID NO: 204800 - protein, 480 aa, Oryza sativa
  Clone ID: PAT_MRT4530_99851C.1.pep
MREYGPAAAPRLLVSDSGRVHEMERFSHYVARQIGFDHVDECPHLCTLAYDYLRKNKGYEENIFAFFQNSQDPETLIVKFIEELDKCILGYFSFHWNYATYIISQVLTVEGAPKRKLRNMVLEATRKQRFERVTRNLKVTRLFSTLVEELKAIGLSSHVEAPRSDVMVPAAHCDRSPVLLLMGGGMGAGKSTVLKDILKEAFWSGAAANAVVVEADAFKETDVIYRAISSRGHHNDMLQTAELVHQSSMDAASSLLVTALNEGRDVIMDGTMSWEPFVQQTITMARAVHRQRYRMGVGYKVTEDGSITEEYWEPVEDSSTDEEGETRNRKPYRIELVGVVCDAYLAVVRGIRRAVITGRAVRVKSQLKSHKRFATAFHSYCNLVDNARLYCTNSTGAAKLIGWKDGESNLLVDPEEIGCLERVSHLNDEADCVHEIYPDGSAAAAWEALVTSPSRAPAQREIMAAVQRSEARFRTTSTPS

SEQ ID NO: 204801 - protein, 225 aa, Oryza sativa
  Clone ID: PAT_MRT4530_99852C.1.pep
MGERGRGKRRSLVGRIGGKRTVTYLGEREGPPPSLPVLELPPSPDLGGGGRGMGGEAPLPAPELPRPLLDLGGRERKGRGGAAFTTVGARAPLSAGFGRGRVAFAEVASPIRLLMPLPAHSPLCDSSTLEDPRVPSSNSPYSESYYARSLAVVLQRRDWENPGVTQLNRLAAHPPFASWRNSEEARTDRPSQQLRSLNGEWRLMRPDTRQHPLTRTPCGRIEYNF

SEQ ID NO: 204802 - protein, 281 aa, Oryza sativa
  Clone ID: PAT_MRT4530_99853C.1.pep
MPPPLEARDYIGLAASPASSSSSCCASTPVAEVVGAHLALRLGLPGSESPARAEAEAVVVDAALTLGPAPPPRGGAKRGFVDSLDRSEGRRAAATAGDDERGVREEEEEEKGLGEAAAGAPRAAKAQVVGWPPVRSYRKNTLAASATKTKGEDQGKSEVGCCYVKVSMDGAPYLRKVDLKTYSSYEDLSLALEKMFSCFITGRSSSHKTSKRDRLTDGSRADALKDQEYVLTYEDKDADWMLVGDLPWDLFTTSCRKLRIMRGSDAAGMAPRSLEQTGQNK

SEQ ID NO: 204803 - protein, 125 aa, Oryza sativa
  Clone ID: PAT_MRT4530_99854C.1.pep
DRSLTAYTTLHRSAVCTCLLCKNQVGVVTDSLPTTTSLLLGGRVFLLCCALVLHLCSVLCCVAAAATSSKAKHNHHQFHLLIQQQQQQHQHQLQLQLLVISLLLCCVKRVCLGVCVSVCLSSLSG

SEQ ID NO: 204804 - protein, 56 aa, Oryza sativa
  Clone ID: PAT_MRT4530_99855C.1.pep
MPLLMEKNPLALKEDWSGKCGLVARVLEDGVGGGRWAMDGGSVIVGVIVVPTGHGG

SEQ ID NO: 204805 - protein, 180 aa, Oryza sativa
  unsure (1)..(180): unsure at all Xaa locations
  Clone ID: PAT_MRT4530_99856C.1.pep
VCYVITFGPGCLCFGDGQVMPFLILSPGYALRPRPRNSVIYSVPALKRPNLFRLLGSVNRINRNDRNFSVILAVTSRLSXGRAHLHLAAFIGHRLLSQTNTSLFCTLCPHSCTPGKNFLVGHPSQIAPSQAYLTSEFFRDRLPEKKLEFVDMSILLILLSPGPGCHINVPIKQHCSVCLQ

SEQ ID NO: 204806 - protein, 686 aa, Oryza sativa
  Clone ID: PAT_MRT4530_99857C.1.pep
MGSSVSKQDDDTALLICKDRLRHIEQAIDARYALSAAQLAYEQSLRSLGIALRQFVEAHKDDDDIERSPSSSYAIVSSSPPHRSDVNHMKSEASTSVTVTINTSQASSVQKEQSVTAFLPPPLQLEFCSSWDFFDPTVVSENVASDASVNSQTFELRTLEDLSNPNEMGLASSIGNTSEIVEVQEVFGAPGWKQVHKNDNLPDLHHSNSNEIQMSGTHLPNDSSLEEELEQVQTQAIGGQNSNDVSDNIKSEANHINVNAPKNEEAKAIFITDSDSSKDFLSCVKDLERQFSRAAVSCHEVSRMLETKKIRLSISSQTKGKSSDVLFRPTFLIGCKAGTAASDGSEKRVTKAITWNRSLSSRSSASKNPLTPAQMDDEFSEICSDFVEEFCMISGSHASSLDRLYAWEMKLYNELKGTESLKKIYDKKCVQLRHQFERDASARQVDKTRVIVKDLYSRLKVETEVLYSISKIIEKLRDEELQPQLLELLKGLTRMWAMMHEIHRVQQTIVSSSDIVYVLRSPRGEPYKQPLVNLVNEMGFFYSSLTNWIAAYKCYVDGLHSWLQKCVLQPYDHTRGRRLTLSPRRHLAPPMFVLLDDWSSAIASLPGEETLGSIKNIMSDLKKMFKNHQAEGNKPETGSKLATLQAGLATMFDRLSKFSTAMSSLSESVKNSTEAAREAYAVGRSG

SEQ ID NO: 204807 - protein, 70 aa, Oryza sativa
  unsure (1)..(70): unsure at all Xaa locations
  Clone ID: PAT_MRT4530_99858C.1.pep
QFQLEIMDHTRSSKKILGKLKVIKKHKKAWGEKIKICESKKXLXIYKISKTSAHRSIKKKLTYTYYMYXN

SEQ ID NO: 204808 - protein, 98 aa, Oryza sativa
  Clone ID: PAT_MRT4530_99859C.1.pep
MPPNESHTLSIPRRRSARTPRTRMEVSPEQGSTWPDDFRCPISLEVMTDPVILPSGHTFERRSIQRWLDGGHLTCPVTNLPLPPSPPLIPNHALRRLI

SEQ ID NO: 204809 - protein, 138 aa, Oryza sativa
  Clone ID: PAT_MRT4530_9985C.1.pep
MAGGKAVYSFQEVSKHNDRKDCWLIIAGKVYDVSPFMEEHPGGDEVLLACTGKDATADFNDIGHTATAKELMPQYCIGEVDASTVPAKPAYRVVSEDASAKPDAASQGAWLTALQLAVPVVLLGLAYALQDFAKTKTA

SEQ ID NO: 204810 - protein, 69 aa, Oryza sativa
  Clone ID: PAT_MRT4530_99860C.1.pep
APVLMGAVLSDGFVSLTPLYIPLRVPERDTQLTELWLLYLLAAGPLASLLHVRGGTLSLGSLPMPRRSC

SEQ ID NO: 204811 - protein, 783 aa, Oryza sativa
  unsure (1)..(783): unsure at all Xaa locations
  Clone ID: PAT_MRT4530_99861C.1.pep
MKAQASKSPPQSWVPEGMDPGKAYLLKIRLHGHQSRENFTFRTEEVIYSDRTNFKDFIDHIREKYPWGVNEFVTMNYFDPVNRNYPQVCSDQSMLEMFDKNMTSKEISMLIQIHKNNEQAVVLPLADWPTPKKVVSGAEPNAVNIHEVPCTPSLAMPSQATILQGSIRTLPVLVLYLQNLFKQAASFLCYYLIVPSVSTIGVAINNARQXKSILLLINSVLTYGWYCDLWLRGTYGVLQVNLAFWYYGADGFXSVYGDGTVCGEMALLWHCQGIAITVMVLYVAXMVVMHFGACMQICDXEMMHVYVLISTLYVHDPCYFSXVKTNSVPHSCSSARRSEKIKPASKAWICEKVKDWLLEDATVGAKELQRRILETHKVLINYKRVYAGKELALEKLYGKWEDSFDKLYSYKAIIERECPGSLVVIDHHTVLNKLRFRRLFFTLKPCIDGFRDGCRPYVAIDSTFLTGKFKGQLATACAVDGHNWMYPVAFGVMDSETNENYKWFHGKVFDDNLWPAAYSYNPYFFQKHIEKMDEAKPEAMAYLRKNHVRLWTRSQFSGQCKVDYVTNNLAECFNSWIRPHKGLHLVDFMDKIRHKLMVKWNRRRSISKKLEGNILPHIMNELNEKSRGLNHEVTRSDDALAEVECKGGSGHRFVVNLTDRTCSCREWQVSGKPCTHAIAFITSIRGCKLENFVDECYSVSRFQMAYSKVIPPLVDKSQWPNPTHDFLHPPVLKREGDPADYQAMLAERSRSVTGSNQPEPLSVLMPLAAPGENSKAKAKTDQN

SEQ ID NO: 204812 - protein, 243 aa, Oryza sativa
  Clone ID: PAT_MRT4530_99862C.1.pep
MAPKRGAKAPVPARKKAAAAAVNPLFEKRPKQFGIGGALPPRKDLHRFVRWPKAVRIQRQRRVLKQRLKVPPALNQFTRTLDKNLGCQKERLLKRAQAEAEGKTVEAKKPIVVKYGLDHVTYLIEQSKAQLVVIAHDVDPIELVVWLPALCRKMEIPYCIVKGKARLGSIVHKKTASVLCLTTVKNEDKLEFSKILEAIKSNFNDKFDEVRKKWGGGIMGSKSQAKTKAREKLLAKEAAQRMT

SEQ ID NO: 204813 - protein, 162 aa, Oryza sativa
  Clone ID: PAT_MRT4530_99863C.1.pep
QRRPSPAAGGGCAPGAGSTRAAANFTTTAMTPATTTLPAVLGDKGGLPWRRAADVHAPRGAPGRRRIFQRRPRPRWQRRRQNFRPCSVTKEADGRRPNIRETAAATLPSPPPTGVFWGVLFGKKFISPCVLLICSVEEVNVEFGLMPILWICDALDLDYCPK

SEQ ID NO: 204814 - protein, 104 aa, Oryza sativa
  Clone ID: PAT_MRT4530_99864C.1.pep
MQLPEFLHPLSVPWVNPAGPFMIPVPARYLMVELRNRVFKVWGLIRSPSGFVPTFLQPVVLGFQEPEARVLGCLRCRRVLNSASRTACFSMVSDLHMLRDVLSR

SEQ ID NO: 204815 - protein, 85 aa, Oryza sativa
  unsure (1)..(85): unsure at all Xaa locations
  Clone ID: PAT_MRT4530_99865C.1.pep
IGFQFKKNQIWEKLVLGGQQFPHQGIYIVWAVIHKIPLHQFGVFYLXRNSGQVQALFDFYAPLSYGIFPRAYGAPRPLTPPGGVL

SEQ ID NO: 204816 - protein, 288 aa, Oryza sativa
  Clone ID: PAT_MRT4530_99866C.1.pep
MAGSFITGALMLILGYAYPAYDCYKTVELNKPEIEKLRFWCQYWILLAVLTVFDRVGDNFVSWLPMYSEAKLAFVVFLWYPKTLGTAYVYESFFKPWIAKYEADIDHNLLELRTRACDMAVLYFQKVSNYGQTRLYEILQYVASQSQTQTSRPQAREQQQRPPPAQTRQVNPAPQPVPAPSVPPLPPQPTQAPSAPPRNQTQDTTPVPVPPPGAESLAQPQAHAGPPQANASDGPQNTEAMQIDPSGPSTSNARQSSIPDEDTLIQEAIRMTRGRLRRRTAGSGPPPS

SEQ ID NO: 204817 - protein, 53 aa, Oryza sativa
  unsure (1)..(53): unsure at all Xaa locations
  Clone ID: PAT_MRT4530_99867C.1.pep
MGMGPLENAVVDAAAEAVAXKAXVXGVGXXGSYXLLQXGEDSEYVRKAYGVYF

SEQ ID NO: 204818 - protein, 458 aa, Oryza sativa
  Clone ID: PAT_MRT4530_99868C.1.pep
MAGSFITGALMLILGYAYPAYDCYKTVELNKPEIEKLRFWCQYWILLAVLTVFDRVGDNFVSWLPMYSEAKLAFVVFLWYPKTLGTAYVYESFFKPWIAKYEADIDHNLLELRTRACDMAVLYFQKVSNYGQTRLYEILQYVASQSQTQTSRPQVLQWLLFLSAVPPVQLLTGCPHYGRWPQHDFTSLKKLRPQSVTSRIQPGSDVIVCAEMDEQWGYVGAKSRQRWLFYAYDSLRKTVVAHVFGERTMATLGRLMSLLSPFDVVIWMTDGWPLYESRLKGKLHVISKRYTQRIERHNLNLRQHLARLGRKSLSFSKSVELHDKAREQQQRPPPAQTRQVNPAPQPVPAPSVPPLPPQPTQAPSAPPRNQTQDTTPVPVPPPGAESLAQPQAHAGPPQANASDGPQNTEAMQIDPSGPSTSNARQSSIPDEDTLIQEAIRMTRGRLRRRTAGSGPPPS

SEQ ID NO: 204819 - protein, 69 aa, Oryza sativa
  unsure (1)..(69): unsure at all Xaa locations
  Clone ID: PAT_MRT4530_99869C.1.pep
GLRRHLRWLNPYLASELVSXHLLYMYSIFEFNSFILEAYYKILPMFKLFLSSTCMHDPIINPYLSKKKK

SEQ ID NO: 204820 - protein, 725 aa, Oryza sativa
  unsure (1)..(725): unsure at all Xaa locations
  Clone ID: PAT_MRT4530_9986C.1.pep
MAAAVVAMPVALALPSEADLPYEEDVLRDPHSIRPWRRYLAARAAAPLQERAVIYERAVRALPGSYKLWHAYLLERTAAAARAKPHCGEHPANEALNRAFERALATLHRMPRIWEMYLAALLEQRLVTRARRAFDRALRALPVTQHHRVWPLYLRLAALPSCPAETSIRIYRRFLQFEPSRADELVELLVSAGRWQEAADHIVSVLNGGSDVSDNNRALLLKLCDLLAKHADEVAGLKVEAVLRGAMREFPDEAGRLRALLAECYARRGLYDKARDVFEEGVTTAATAAEFALVFEAYAQLEQSLVAAKMEKTADEEGDKLVTGCWLADGDDGDMCLARLERLLDRRQELLNGVLLRXTYVEAVRTVDPAKATGKPSTLXKMYEAHGNLDSADEVFAKATQASHRSADDLATVWCEWAEMQLRHKRFDKAIALMRQATAEPSAEVKLRAAAAAAGDDEPAQLKLHKSAKLWSFYVDLEESLGALASTRAAYEGAMAARAATPQMVINYASFLEERGYFEDSFAAYETGANLFGHPHSKPIWDTYLERFVARHGGSKAERARELFAEATRRAPPHDRARLFLRHARASVYEAYAGRAAELRGVPKVRRVYEQAIESGGLPRRDALALCLRLAALEEALGEAARARAVFVHASGYGDPDADEEFWAKWSGFEVRHGDERTFTDMLRIRRTQKHAKTPGVQVNGELKDEKKKRCADQLGATQSKRQRV

SEQ ID NO: 204821 - protein, 144 aa, Oryza sativa
  Clone ID: PAT_MRT4530_99870C.1.pep
LSTKRSALERLDRYRLRLRKAEEDLHHKEDKRRVVADTLEVANKRAAKRECQLVAAAEDAAAEALAPATESAKQACYTLRLALYVLGARAEGALGDDGMAFDFSEWMQDAAGSVVEVVGAYGNFCARVVAGFVLSLLHEHGCDH

SEQ ID NO: 204822 - protein, 49 aa, Oryza sativa
  Clone ID: PAT_MRT4530_99871C.1.pep
MATRELDEGPGYMRPRRGPLGEKVDEEGGMEIVAILSALPTRPFTGRSV

SEQ ID NO: 204823 - protein, 869 aa, Oryza sativa
  Clone ID: PAT_MRT4530_99872C.1.pep
MATAGSPSPYPGDSPEPSFSGEKVYVAVGEESSRGTLLWALHKFPQGTAFVLLHVYSPPNFLPILGAKIPAGQLREQELIAHKKMNLQRISDNLDQYQLICAQQKVQAEKLVVESDDVAYGLVDVISEHNVSMLEDTKERGESDNELQHIPMQLERVRQEAYEEKCRREKAEQELFEALQKVGESVYGSVYKGLLRQTNVAVKKLNPESTESLSQFSHEVEILSRVRHPNLVTLIGACKDARALVYEYMPNGSLDDRLACKDNSKPLSWQLRTRIASNICSALIFLHSNKPHSIVHSDLKASNILLDGNNVAKLSGFGVCRMLTDEFKATTTLYRHTHPKGTFVYIDPEYAISLTAESDVYAFGVVVLQVLTGLLDLNIADQVREALKMDAVHSVLDASAGSWPEVQAEKLLRLALRCCSLERKRRPAITRHTRVHRRTLQIEKDFLKNRDNIAAFWDKLTLDQAKTILSLADVDIEGVTGPSILAALSTWMCKPGYASLPLPYARAGNQLLWLYIKHQVEAWSADKAAEALRCQKLLVEEEEAAQKRQAELIERKRMKKLRQKEQRLKDLKDEDVTDRFPGSVDGTTDSSGILSLKEATSDPGLYEQEDTQLPTPVASEDNSSFADLPVEHDIHDPGHEVNPSVTLNQQVFSRHRVGRTENFAQNSFASGGSAIGSKHPASVRHSHYRGANAGAVSNRNKTWTWKVRTEIEEHSPKDELNIDDGQEIVLNKKSRVLIGSISVAIEDGSECLEDNQYSKEYPTPASQLNIGNHPVTKVMQPFNHGEEGNGYNAHNDVEVSITPTAQDHSSSGVMTDGNNCSSCCNAGLAEGGGLRGAIFSSKEAAAFLSQRWKEAINADHVKLVLCPEG

SEQ ID NO: 204824 - protein, 631 aa, Oryza sativa
  unsure (1)..(631): unsure at all Xaa locations
  Clone ID: PAT_MRT4530_99873C.1.pep
MGIAAPPCQPGQTTTFVISQPTSSKSSPAAIVVRPPATASSSSMSHSQGFHQPSSGAVFGFSSDGFDGRPGSGQDHQQHEQQQQQHVAQQSRSAPGSSNTSSTRTRAMQXAPVGEADPGLSRNQVSNWFINARVRLWKPMIEEMYQQECKELEGSSGAGDDPSGADDTHSADDHRRRASSAQARAANCXSTAARPRAAAPLCGASLGSLGETSSPKQQASGMAGLAADPAAAMHLFLMNPQQQQQQQSRSSTSPPPSDAQSAIHQHHEAFQAFGGAGAAAFGGGAAAGVVEGQGLSLSLSPSLQQLEMAKQAEELRVRDGVLYFNRQQQQQQAAAAAASVQQQLPMALHGQVGVLGQQLHGGGYGGPAGVAGVLRNSKYTRAAQELLEEFCSVGRGQIKGGGGRGSAPNNPNSSKAAASSSGAAQSPSSASKEPPQLSPADRFEHQRKKAKLISMLDEARVIRVASLPGEKVFYMGVDRRYNHYCDQMQMVVNFFDSVMGFGAATPYTALAQKAMSRHFRCLKDAIAAQLRGTCEALGEKDAGTGSGLTKGETPRLRAIDQSLRQQRAFHHMGIMEQEAWRPQRGLPERSVNILRSWLFEHFLHPYPSDADKHLLARQTGLSRNQMHIYVI

SEQ ID NO: 204825 - protein, 851 aa, Oryza sativa
  unsure (1)..(851): unsure at all Xaa locations
  Clone ID: PAT_MRT4530_99874C.1.pep
MATAGSPSPYPGDSPEPSFSGEKVYVAVGEESSRGTLLWALHKFPQGTAFVLLHVYSPPNFLPILGAKIPAGQLREQELIAHKKMNLQRISDNLDQYQLICAQQKVQAEKLVVESDDVAYGLVDVISEHNVSMLVMGAADDKHYTKKMKVLKSRKARVVEQHADHFCKIWFICKGTLEDTKERGESDNELQHIPMQLERVRQEAYEEKCRREKAEQELFEALQKVQVSENLYFGELKQKNEIEVKLATTMEEVDRLARTADELAAKFQEQCEKILVLEKRSAHSDRIIKDLMLQRDKAVREAEAIRVKNGESTAIADRTIPITELSISEIKEATSNFDHSSKVGESVYGSVYKGLLRQTNVAVKKLNPESTESLSQFSHEVEILSRVRHPNLVTLIGACKDARALVYEYMPNGSLDDRLACKDNSKPLSWQLRTRIASNICSALIFLHSNKPHSIVHSDLKASNILLDGNNVAKLSGFGVCRIRCRTRRTPSXRTNPMGTTGYMDPVFFVTGELTAESDVYAFGVVVLQVLTGLLDLNIADQVREALKMDAVHSVLDASAGSWPEVQAEKLLRLALRCCSLERKRRPAITCDAEWRRHTRVHRRTLQIEKDFLKNRDNIAAFWDKAKTILSLADVDIEGVTGPSILAALSTWMCKPGYASLPLPYARAGNQLLWLYIKHQVEAWSADKAAEALRCQKLLVEEEEAAQKRQAELIERKRMKKLRQKEQRLKDLKDEDVTDRFPGSVDGTTDSSGILSLKEATSDPGLYEQEDTQLPTPVASEDNSSFAHLPVEHDIHDPGHEVNPSVTLNQQVFSRHRVGRTENFAQNSFASGGSAIGSKDLVTVRHKHYTF

SEQ ID NO: 204826 - protein, 142 aa, Oryza sativa
  Clone ID: PAT_MRT4530_99875C.1.pep
MCKPGYASLPLPYARAGNQLLDLIETTASRLPVSSNELFSMLDEASENTFLSTNPTACIQKFIFNGEADKVAPELKNAVACTSYMLEQTLVEAWSADKAAEALRCQKLLVEEEEAAQKRQAELIERIRMKKLRLKEQRLTDL

SEQ ID NO: 204827 - protein, 190 aa, Oryza sativa
  Clone ID: PAT_MRT4530_99876C.1.pep
VVESDDVAYGLVDVISEHNVSMLVMGAADDKHYTKKMKVLKSRKARVVEQHADHFCKIWFICKGTLVYCRKAAPFGHDVMQDCRQSATSAQCSVERSSSLSEIWCVSNTWLHKLNLEPHIETTSSDRYSDKEKEDTKERGESDNELQHIPMQLERVRHEAYEEKCRREKAEQELFEALQKVQVSENLYFG

SEQ ID NO: 204828 - protein, 71 aa, Oryza sativa
  unsure (1)..(71): unsure at all Xaa locations
  Clone ID: PAT_MRT4530_99877C.1.pep
FSTLDRESVLNAHSSXWLFNRAHLRYGYLPLGTYGASQYPLPSLGGCLVMSFNIIVVLKLKISSYIIICDM

SEQ ID NO: 204829 - protein, 68 aa, Oryza sativa
  Clone ID: PAT_MRT4530_99878C.1.pep
MDDDGDLADAGDYGGLADARDSGCRARQRRLCDAGVGAGQAEGDSPMDTMDKGVSHGVSRSSTNANHG

SEQ ID NO: 204830 - protein, 85 aa, Oryza sativa
  unsure (1)..(85): unsure at all Xaa locations
  Clone ID: PAT_MRT4530_99879C.1.pep
HVPDGKKKKLPGTARQSVHLRQXRWEQADTRQHEPAGWHAARXATLGWQTKQKXWRVQERMHSQSSXRHQPGVCSTGEGPRTXTP

SEQ ID NO: 204831 - protein, 844 aa, Oryza sativa
  Clone ID: PAT_MRT4530_9987C.1.pep
MQAKELLAELVLVEEEIARLETQIRSMKKAAATTTTQNAINLTHDDTVNANVNSGGSAAGDHANIKSMFFISQAINGLDTSRHHHPLMTIVSNKPPTPSPKLNSLDDTSSSSNKKKKMVQQPNKLSERIVKCLICIFIRLLRSSRVADLQLQQQDNNNNNASSRSSSSSPSLTRQHQGGGGGGSFRIDTSLVMNKQQQQQDCRSGQQDHYGIFAIPDSIVRDIGPYKNLVSFTSSAFDLRGFSTSPLLTKLRGMLEALQHVDLRFLTHHQKLAFWLNIYNTCIMHGILHNGLPSNPEKLLALKNKATLNVSGQKLNALVIENFILRQPSSVKEEFWKCEVDVEEQQVRSRYGLNSSEPNILFALCCGNRSSPALRIYKADRVMMDLEKAKLEYLQASLVVTSTRRRLMIPSLIHSNMHDFAKDLDSLVRWICDQLPTSWSLRKSMVDCLRWSGHRLNIHHLVDVIPYDYDFHHYKHVHGGGGMRGGGGGRLRNPCLTMHQPWASLLVHGIKRVEGRSWPSPLTGRLWIHAASKVPEADTIKAMEEFYREIYALDGITNITFPHHYPVSRLLGCVEVVGCVTSQELASWEHVPQSVRLEALTDFCWLCENPQKLVVPFDMRGYQGVYNLERRIYEGAVRGLSPVQGPLPVNFPLPDPTNPLSLNPGSLQLHSSRSAALDKSPSVTAAIAGARAAATQYSRNNTAITSTPTEETRQRFSRENHADNTSGPSIVHDRSPVLQNQNLPSLALTNPPYLKNQTMPSFVQNNLPNLQNHNLSYLPHQNLSADVSNRRIAFAKPESIVSSPKWSVLFAKPECRASGEVPDYKMNLPVGLAVALRGIEANEC

SEQ ID NO: 204832 - protein, 93 aa, Oryza sativa
  Clone ID: PAT_MRT4530_99880C.1.pep
MTMTAATTVLGDPAALIVPVHGRHRVCPHPCRPGRWMTTRRSFACPLLLLSAPTPSLSFRRGPSSASLIAASADAASSNASSPRLHHRPLRRP

SEQ ID NO: 204833 - protein, 45 aa, Oryza sativa
  Clone ID: PAT_MRT4530_99881C.1.pep
MAWRRRRSRGGLNPVATDDVEDDGDSAKDGGGHRADNWSACEKSS

SEQ ID NO: 204834 - protein, 119 aa, Oryza sativa
  Clone ID: PAT_MRT4530_99882C.1.pep
MRRTPSLHAVPADRARSRRTLAAARESRPTRAVTFVRYVVIKLGEIIPGGPSFAVKTHAMSNVMRRTGHKHIADYLAINQTISDNKSYTTALRRGVLRGCGSGEEEGMLSLPPAPRYMA

SEQ ID NO: 204835 - protein, 128 aa, Oryza sativa
  Clone ID: PAT_MRT4530_99883C.1.pep
MGEVASAASRRRRWRRRRWWRGGAAAVWAGWCGASGVRRRCARRVRRRRRAGSAVAGASTTRSATRATSTAAASTSPAGWTTTPTPRSSTTATPSPPAAASPPPPPPPLAPTRAASPPAALLQPRPPI

SEQ ID NO: 204836 - protein, 53 aa, Oryza sativa
  Clone ID: PAT_MRT4530_99884C.1.pep
PTRPPELIKLFSRLREMKKENAGLSVMDTTRRSIIARMKQLMPIYTQVATLFA

SEQ ID NO: 204837 - protein, 499 aa, Oryza sativa
  Clone ID: PAT_MRT4530_99885C.1.pep
MGRVAPSVEEVGGEQPPPALGPGETVSGTVAELRAAYESGRTRSLEWRQSQLRGLLRLLAEEEAAAFRALREDLGKHQAEAYRDEIGVLVKSANAALREVGKWMAPEKVWVPLIAFPARAQLEPQPLGVILVFSCWNVPLGLSLEPLVGALAAGNAVALKPSELAPATAKFLGDNVGKYMDATAVKVIQGGPEVGEQLMEHRWDKVLFTGSPRIARVVMAAAAKHLTPVALELGGKCPCIFDTIGGSARDLQTAVNRVVGGKWSSCAGQACLAIDYVLVEERFVPVLIKALKSTLKKFFADSDHMARIVNARHFQRLSDLLKDKSVAASVLHGGTLDAKNLCIEPTILLNPPLDSAIMTEEIFGPLLPIITVKKIEDSIAFVRARPRPLAVYAFTKNAALRRRIVEETSSGSVTFNDAVVQYGIDSLPFGGVGESGFGQYHGKYSFEMFSHKKAVLTRGYLIELTARYPPWDDSKISMMRQLYRYNYVGFVLTFLGLKK

SEQ ID NO: 204838 - protein, 149 aa, Oryza sativa
  unsure (1)..(149): unsure at all Xaa locations
  Clone ID: PAT_MRT4530_99886C.1.pep
MRRRTTSSAPGWERVEKPLPPLGTQPPLAPAPAPPCLAAAASPPPPPPLASPPRLXPPPPPRWPXAAASPPSLPSLASLPPRLHWPAPPYWPRWSPPGSRGPAGRCLPPPPPQPDCHQPRPEAAAASSAANPTCSGTRRAPPPCASLSL

SEQ ID NO: 204839 - protein, 111 aa, Oryza sativa
  Clone ID: PAT_MRT4530_99887C.1.pep
MDDAGNSSKEAEAQAPAPANQAPATAAAAARGAIHRGPMLRLAAMQLMLFAAYEIVSSSAIDELEQCECDSLSGYDAASQARSAEQQQQSPVFWPRPSVPGQNSTSKADAN

SEQ ID NO: 204840 - protein, 254 aa, Oryza sativa
  unsure (1)..(254): unsure at all Xaa locations
  Clone ID: PAT_MRT4530_99888C.1.pep
RQAISLIHFVNFLRKKYELPRPPKYRGRLNYTPEPQNQTFFTPNYANRTNYPPQPNPRCFWCTMRQRGEARQCGGGGGAAARRATXRRRRGGSGEASAAAARRATGVEEARRRRRGERGGGEASGXGRRRRGSGGSEASDGSEGGEAAAERPAWWRWGRRRGGEASGGGGGGEAAAARQGGAGAGASGGWVPSGGSGFSTLSHPGAEEVVLLRITACCRCSPLLRSCPTTTWARRAAMAKSERRRRRGVLSSKS

SEQ ID NO: 204841 - protein, 130 aa, Oryza sativa
  unsure (1)..(130): unsure at all Xaa locations
  Clone ID: PAT_MRT4530_99889C.1.pep
LELRPNFCVAQESSIAAPILHWRPPQLQQQQTQAGGMAHTPLTLNTAAAAVGNPVLQLANVIXLDACGKAKEASASASXAADVEAIKAKIIFHPHYSSLLAAYLDCQKVGAPPEVAAFMGGAGVIATPAG

SEQ ID NO: 204842 - protein, 115 aa, Oryza sativa
  Clone ID: PAT_MRT4530_9988C.1.pep
MKPLLLLISSIVVMTFLLLLSGAGALTADHATVGVAVAGGKRTRHAEELSEMDSVPYPQRRVLQGGNTVYRPLGRGAACNPICPGRGDRYTGRGCKSRYQCRGIIVTVFQAYKHS

SEQ ID NO: 204843 - protein, 105 aa, Oryza sativa
  unsure (1)..(105): unsure at all Xaa locations
  Clone ID: PAT_MRT4530_99890C.1.pep
MPPPTASGVLSVACRXNRALSVLRRLRFLGYCTPTVRQNASEDLPGAGLHARSHQSVLPIDCALGSLRVWHPTDLDGSKDGHVSENVKILKSRDGDSELDEVLNQ

SEQ ID NO: 204844 - protein, 361 aa, Oryza sativa
  Clone ID: PAT_MRT4530_99891C.1.pep
MEEISHHFGVVGASGVHGGHQHQHHHHPWGSSLSAIVAPPPPPQLQQQQTQAGGMAHTPLTLNTAAAAVGNPVLQLANGSLLDACGKAKEASASASYAADVEAIKAKIISHPHYSSLLAAYLDCQKVGAPPEVAARLTAVAQDLELRQRTALGVLGAATEPELDQFMEAYHEMLVKYREELTRPLQEAMEFLRRVETQLNTLSISGRSLRNILSSGSSEEDQEGSGGETELPEIDAHGVDQELKHHLLKKYSGYLSSLKQELSKKKKKGKLPKDARQQLLNWWELHYKWPYPSESQKVALAESTGLDLKQINNWFINQRKRHWKPSDEMQFVMMDGYHPTNAAAFYMDGHFINDGGLYRLG

SEQ ID NO: 204845 - protein, 115 aa, Oryza sativa
  unsure (1)..(115): unsure at all Xaa locations
  Clone ID: PAT_MRT4530_99892C.1.pep
KNSSVVMRXGPNLLKLXRKEQCXGLGHRXXXXYKXXXQLXREXPQWQVQSLRPKDXXFPEKVNPGRQGVGQXFXSIGXXVSPXXVXFPGKXXFDITYCSCSLITCVLGGWTCFNG

SEQ ID NO: 204846 - protein, 53 aa, Oryza sativa
  Clone ID: PAT_MRT4530_99893C.1.pep
VLKARYDRRIYLLVDWGRANTSANKKPRASLSTTNNFMSNYPSPEKKNSLIAG

SEQ ID NO: 204847 - protein, 329 aa, Oryza sativa
  Clone ID: PAT_MRT4530_99894C.1.pep
MELATHDLAALGAADLVRVSASIPRAAPRTFALLTAGLVFPLSAAVLVHSLFTHPIILRLQGANGDYSSSDSAQWLKLFAYQFLYLILLFTLSLLSTAAAVFTVASLYAAKPASIASSLAALPPILPRLLRTFLWVSLLMLAYHLVFALTVLLLLLLFAPSSSPPSLPFVLILVVVVFVFLAIHVYISALWHLASVISVLEPLCGLAAMTKSKQLLQGRTRTAGVLVVSYFAACGVTAVLFRAAVVKGRGEEGSLGLSLPGRVLAGAVLVSVLVCVNLLGLLVQSVFYYACKAFHNQQIDRSALYEHLGGYLGEYVPLKSNIQMENLDA

SEQ ID NO: 204848 - protein, 56 aa, Oryza sativa
  Clone ID: PAT_MRT4530_99895C.1.pep
VKALRETMFPQSSRMALDKASLKWIDSSSKFGHGAFHTPADKKQYQGALKKGLSSA

SEQ ID NO: 204849 - protein, 58 aa, Oryza sativa
  Clone ID: PAT_MRT4530_99896C.1.pep
VTIRYAQDERILQHLRRAQNYKTLATDALSLKTNLKHSQVFNTLQKTILEIPPCRVQP

SEQ ID NO: 204850 - protein, 222 aa, Oryza sativa
  unsure (1)..(222): unsure at all Xaa locations
  Clone ID: PAT_MRT4530_99897C.1.pep
KNFTGIVPSSIGKLTKLSLLNTEFNLLQAHKKEDWEFMNSLANCSRLQVLSMGHNRLEGHLPSSLGNLSTXCDNLFSQEISSGFFPSGIEHLSDLNSLGLDNNELTGSLPEWLENLKKLQKLTLQNKNFPXLXAVIPSSVSNLLQLAVLGLYSNKLEGHIPSFVNLQMLQLLVISSNNLHVSIPKEXFSIPSIXQFDLSFTNLDGQFPTEIGMLTTRIFGTS

SEQ ID NO: 204851 - protein, 67 aa, Oryza sativa
  unsure (1)..(67): unsure at all Xaa locations
  Clone ID: PAT_MRT4530_99898C.1.pep
EDHLFAAFRYFDKDGSGYITXDELQLACEEIGLXRDVQLEEMIREVGEDNESKKKKEPTFPFHWDRS

SEQ ID NO: 204852 - protein, 105 aa, Oryza sativa
  Clone ID: PAT_MRT4530_99899C.1.pep
MAGPLDCGNATGGAVTKSATGGVEFPECPNFAKSSHNRKETGGKKLGNSRIAPCVQERADGSSRGDGSSSEVSLPNSQIRCSVRFESSELHGRIRELIGFWKPMS

SEQ ID NO: 204853 - protein, 125 aa, Oryza sativa
  Clone ID: PAT_MRT4530_9989C.1.pep
TNAAPRPRRLNPEEVAGDHLRGGGGLPVGRLDPEEVTGDHLRGGGGLPVTTYIVPEQHYESLPEGVLTADQQKQFEEATTLFVGCILSVLGDRLVEVYMHLTDAKELWDALNTKFGATDAGNDLH

SEQ ID NO: 204854 - protein, 276 aa, Oryza sativa
  Clone ID: PAT_MRT4530_998C.1.pep
MGSPRTPNGSQKKPVLGKVKSKAKKWMHLLHHKKKPQEDMQDPVQTAAAAMSTTMQTTDPQAQLDIHPHSSCESACAPEVYMEASPRQNSPLPSPTAHNEQQYFKISSRFKSEMKEAMLRESKQLRVNTTKPKTVTFAPILEQGAETVKNDWHRKELWETATEIFSHAYAIVYEAVLRMVSIIQDAMLSYNIGRRQMLEKIISFNRYLMLKLAPGEGDKVLSKVITEAALDMFYAWCVNVERPLVQRAKEVFSWFLPERREELPPSCSTVHPSLCV

SEQ ID NO: 204855 - protein, 116 aa, Oryza sativa
  unsure (1)..(116): unsure at all Xaa locations
  Clone ID: PAT_MRT4530_99900C.1.pep
IDSAPHIVTVTLRERDANELXTKCHASGTYDRLELVAGSQNVHQLYRVDTVDTHIDRYYXKCITSEDMDXDMNIANTTTTAHIAYTGDVHKLCEKLGGASGATMGHILLLQSAYIA

SEQ ID NO: 204856 - protein, 164 aa, Oryza sativa
  Clone ID: PAT_MRT4530_99901C.1.pep
MPPTSTHIAHRLLAVLAMGHVGNSRLAALEGEERVIRALEPAPHLGHPAKGGEHKHQERRSTTVQRNGMIGRNPERKWSEAPVVVAEEERGPPVAEEEDEEEGVDFISDLPDAILGEIIVRLPTKEANSTQVLAALMLHTAQPRLLSSPREKGCPRWLRFRIPS

SEQ ID NO: 204857 - protein, 62 aa, Oryza sativa
  Clone ID: PAT_MRT4530_99902C.1.pep
APPPCWSGFSPSGFWFLPLSQSMASEPSTLSVLVVPVWVFPDICIFIRWFVAPLRRDFFYSP

SEQ ID NO: 204858 - protein, 58 aa, Oryza sativa
  Clone ID: PAT_MRT4530_99903C.1.pep
ENVNRGGGSTFACENQFFQGAHLRGLSSSFLTFSTLLVPPILTPSFVQSILFLFIFYF

SEQ ID NO: 204859 - protein, 103 aa, Oryza sativa
  Clone ID: PAT_MRT4530_99904C.1.pep
GKPGYRLAGTRSRNSPGSDTTRAAENLCQTCMRKCSSGRRTISAGIARWCPQDILRPVGSQASSRSRAKKDHLVMLQDIQTFRDEGYVSSGIGKLACRKKGLG

SEQ ID NO: 204860 - protein, 265 aa, Oryza sativa
  unsure (1)..(265): unsure at all Xaa locations
  Clone ID: PAT_MRT4530_99905C.1.pep
LGLGGWSPFPILKRAPARWPYFGFKPPIPSPVSRDSRRLGGPTLLGAQTSPRATEVYRGTLPTXGSVLAVKRSQQGSLQGNLEFRTEIELLSRVHHKNVVSLVGFCFDQGEQMLVYEYVPNGTLKESLTGKSGVRLDWKRRLRVVLGAAKGIAYLHELADPPIIHRDIKSSNVLLDERLNAKVSDFGLSKLLGEDGRGQITTQVKGTMGYLDPEYYMTQQLTDRSDVYSFGVLLLEVITARKPLERAALEDPSLRTRACDVIALL

SEQ ID NO: 204861 - protein, 53 aa, Oryza sativa
  Clone ID: PAT_MRT4530_99906C.1.pep
PGPVHLRPQLRPPGGYSIAGAPAVVAPHGRLGLEEAEVIALFRGTTATSLLLP

SEQ ID NO: 204862 - protein, 407 aa, Oryza sativa
  Clone ID: PAT_MRT4530_99907C.1.pep
MEHKLGCWQDLNKKGIGSKKCRRDLYGAKLRDWRKITHGWEELNLKENYKDKLWWNLSKDGKFTVKSFYNALKMKQELFGFWIKNADKFTKNLIVVGIAAVIWSIWKCRNKACLEKKLQNDPTNLIHMACNWVDAWAVNRKRSALEQDDATIGGDKKRLRLGSIYDYRKLAVLGEGRDGVVFKAEHLRTGDMVAIKWVRAAADHRAFIREVGCLAACRSHRNIVEVRDVVEDANTRDMFIVMDFVGGRTLHLDLWMTHPDPEEKARLVMRDLVAAAGALRAAGVMHRNIKPDNVLVTYGGGLKLCDFVRSSQRPRTLFFCSKEDFAGRSHNNAANENQFSLMAVLACNKRKSFSLARTWLSSTKRTLAVSSATSENPFSVNKLKSFFIVYHSTKCDYHIYIYVIVLN

SEQ ID NO: 204863 - protein, 650 aa, Oryza sativa
  unsure (1)..(650): unsure at all Xaa locations
  Clone ID: PAT_MRT4530_99908C.1.pep
CASGAYAANSTYEANLAVLAAALPGXVHRAAAGYATATVGAVPDQVSALALCRGDANATACRACVAASFRVARRDCPSSKDATTYQDGCIVRFSDQRFLDFVGVNSPVSELYSDADSNITAVPVAWFNAAVVALMNATVDTAVAAGSGSNNTKKYFATAVEDFDPKHYPKIYGMAQCAPVMTAAQCRSCLGGFVSSIPWFLNGKPGGRVLGIWCNLRYSVKPFYQGQPMLQISAPPEPPPPAMPSLAAPPTRTARRRRVAGISAGVACFVVLMLILSAYAFIRFKRKKAAKKDNLLKKMARGKCTIFDLATLKEATENFSEKHKLGEGGFGTVYKGKLPDGQEIAVKKLIESCGHGLNQLHNEVLVLAELQHKNLVRLQGFCVHKDEMLLVYEYIKNGSLDNFLFAHASRGNALSWDQQYNIIFGIAKGIMYLHEDSSIRIIHRDLKANNILLDEDMDPKIADFGLARLIGGGHTHTKTTRIVGTYGYMAPEYAIHGNVSPKIDIFSFGVLVLEIVTKRKNCSYGDGTTDTVNLLSDVWSYWTEGVISQVIDQSLEGHFRNQALRCIHIGLLCVQSDPDDRPDIPSVIFMLTRDNMELQPPTEPAFFFNGNSNSASQTSDQRVYVYDRSGKIYEEDISANGITLTDIYPR

SEQ ID NO: 204864 - protein, 305 aa, Oryza sativa
  Clone ID: PAT_MRT4530_99909C.1.pep
MAATRNRKRSAPEQDDATTGGVKKRLRLGSIYDYRKLTVLGEGRDGVVFKAEHLRTGDMVAIKWVRAAADQRAFIREVGCLATCRGHRNIVVVRDVVEDASTGDMFIVTDFVGGRTLRLDLWMAHPDPEERARSVMRDLVAAAGALHAAGVMHRDIKPDNILVVNGGGLKLCDFGSATPVKPPGKPYEESRVGTLLYTSPEQLADSEFYDPAVDMWALGCIMAEILTGGPLFDDSSEERMLKEMADMRHRLESTGTCKLFDELPELSAAGREVLAGMLAFNPDERMTAAEALDHRWFTGKPERRS

SEQ ID NO: 204865 - protein, 46 aa, Oryza sativa
  Clone ID: PAT_MRT4530_9990C.1.pep
RPPPHDVGGKCPSYLLGGRAVYVACSSRFQHGSVRVFPVRCMLRCF

SEQ ID NO: 204866 - protein, 140 aa, Oryza sativa
  Clone ID: PAT_MRT4530_99910C.1.pep
QIHKNKGTESAVPSPPALQTSRVSHSCLAMNERDRFVLTDRSELLLLILVWLHFAGCWLWSICLWTITEMYLCIWILLCYVSCLFFWTELLVVAVIYGVQRLLYYCTGEALYGSTMVLLNSGYCYPLLECFLLDLVSIEY

SEQ ID NO: 204867 - protein, 303 aa, Oryza sativa
  Clone ID: PAT_MRT4530_99911C.1.pep
ANALAVELEKQIDKLKKDVEAQSVKKATLENRANDAEKRVQELNAKIDALQKTNDEQKRKLQSTERALKVAEEELMRLHLEATTKSKQLTEVHGAWLPPWLAAHSAHYMEVISGHWNEHGKPAINSFLQKASEKSAQAKKWAEPHVETAKMKWVPVKEKLVVLKKNTEPYVQKVSSKSVEVYEASRDAVKPHVAKVKEFADPYFQEAKKFSKPYIDQVAEVTKPHVEKVRTTLKPYTKRAVRVYGSFLESATTYHRQAQSTILDYLHQHEVSKSLATKELVRFLASALLAIPVYIIYRASMEA

SEQ ID NO: 204868 - protein, 85 aa, Oryza sativa
  Clone ID: PAT_MRT4530_99912C.1.pep
HAYVDAMEDAWYNSSTLNHMLYAMQKELEPLVKGQPMDKVFPDCRRGQMKRVATSLRTFCNVDIPIGSVWYSYWLRYTMNPASGY

SEQ ID NO: 204869 - protein, 243 aa, Oryza sativa
  Clone ID: PAT_MRT4530_99913C.1.pep
EKRKSGINSFLQNASEKSAQAKKWAEPHVETAKMKWVPVKEKLVVLKKNTEPYVQKVSSKSVEVYEASRDAVKPHVAKVKEFADPYFQVLRTSTFMNLEYLPLMAALEAKKFSKPYIDQVAEVTKPHVEKVRTTLKPYTKRAVRVYGSFLESATTYHRQAQSTILDYLHQHEVSKSLATKELVWFLASALLAIPVYIIYRLLMEAFCSKKPKRPPHGDLGAESAMVEGYIWVMGNPEKCCIPP

SEQ ID NO: 204870 - protein, 97 aa, Oryza sativa
  unsure (1)..(97): unsure at all Xaa locations
  Clone ID: PAT_MRT4530_99914C.1.pep
TISFKVSAGFPHNVVFDEDPVPSGVXVSNISQKEYLNAPGETLSVTLTVPGTSGFYCEPHPGTGMVWQGHPPISILSYQSKYASFGSIPYIYISICP

SEQ ID NO: 204871 - protein, 560 aa, Oryza sativa
  Clone ID: PAT_MRT4530_99915C.1.pep
MWAVRSLRRNLLRAASSPLHPRCPLPPGSFAAGCGGEAAAAASARSALLPPPGAGGGWWRRRMMSTTKGRSMRSKVEKRMARETGRTQRELRRAVKLRKKLMTDDERLIYSLRRAKKKVALLLQKLKKYELPDLPAPRHDPELLTAEQLQAYKKIGFRNRNYVPVGVRGVFGGVVQNMHMHWKFHETVQVCCDNFPKEKIKEMAAMLTRLSGGIVINIHNTKTIIMFRGRNYRQPKNLIPLNTLTKRKALFKARFEQALESQKLNIKKIETQLRRKGINPEDPVAMASIQRVASTFFRAIDEQQGTPYVFRGDTQPTAGTTEIKEPHDQQSEDSDQEELDRFIAEIETAAEQQWEEEEAAEKEESSRLRYWDREEGSERRGFNRSYDNPGNEYRDQGRYTRDNNRRTADSRRWDDDSEIDVSGEEWDSDDDKDNVFDNDVDAPDEHPRRFESMRSEKSRSDRSRNYTSRGSRSSIEKPRNSATASGRSVFRESEDDELDTEDDELWGPDLKEERNLRAPKVNFANYHSGTSSEEDTDDNWKQDSRTGNTRKNTDESWDSD

SEQ ID NO: 204872 - protein, 196 aa, Oryza sativa
  Clone ID: PAT_MRT4530_99916C.1.pep
MGPICQYILSFPVSMFLSLPLSFDDAFFLASAAREQALRMAVTGGGVEEDAATPLLPPPTPPRSALPAPTWAQASPPRHTQSESHPQENATCIAQNTTMSSVSVSRNGSESLRPHIGNGTKRKVWILVEIGDDVTEKLSGRGGRRPHRVVSPSATLCRFPIRHSAARHRPSAPAWPHGVSSPSTSKNNALSFKLVS

SEQ ID NO: 204873 - protein, 1217 aa, Oryza sativa
  Clone ID: PAT_MRT4530_99917C.1.pep
MPWLRRAFGALGVCVVLRGAAPAPAPMPPSTGGRGGVLFASNHRTLLDAVFLSVALGRPVVTITYSVSRLSELLSPIRTVRLARDRATDGATIRGMLDGGDLAICPEGMSGCLQMCDSAKALGAPLIWLAGFGVDHENILERPRYITKQAAQIMAQDGKLDQLLKMMEEAEKKREEMERRREESEALSLAELQSLKVAVESRILLVEKKVSELGGSVSDLEKKVSLIQAGLEKCQREVQQRTMFKGESSQGANHVLTEEDLNGNFPNPFLYTPNQGWRNPQFNSVSPFIPDSSNYQTFDAGMVSIGGNVPPMSCPQFDGENPQMWRDNCEIYFDVYGVHVANWVKVALLNFTGNASFWLQPVRNQLVGISWMELCDKVCRKFTRDRQEHLIRQWFHVGQTGSVAEYVERFDGLMHQLLSYDNALTPLYFLTKFVDGLKEEIREAVMLQKPIDLDATCSVALLHEEILEGSKKTNYKKGEGTGLHRVFSRPTLNTAFPKSPVTSPVEDKKGVDSVRTNFRDDKVSALKSYRRVKGLCFTCGERWGKDHKCAQTVQLQVVEELLEAFQIDETDNTMVTSPEPVLENNQLMAISLNAYNGTDSTRSLRIVHHLQGVVKLPVPVKVTIADGGLLQCEKQLPDCAWWLQGRCYKSNFKLLPLSGYDAILGMDWLVGLGVMKIDWEQKWLEYLDNGFPVKIQGVQSKVDECHLISGDQLKGLYKAGGLMHLFQVARDHSNSVPVIPDSVQHVLTEFASVFETPQGLPPRRQCDHYIPLLPGSKPVNIRPYRYNPTQKNEIEQQVQEMLRSGVIQQSMSPYSSPALLVKKKDCTWRLCVDYRQLNAITIKSKYPLPVIDELLDELVGAAWFSKLDLRAGYHQIRLVAGEEPKTAFQTHFGRFEFKVMSFGFTGAPATFQGAMNDTLAPVLRKCALTHVQDLKKVLQLLQNHQWKVKMSKCSFAQQELNYLGHTIGVHGVSTDASKVQDIINWVVPTNLKKLRGFLGIAGYYRKFVRNFGVPSKPLTNLLRKGVEFKWTPEDERTAQLLAELSIHTKEGSLYQLRDGLIRYKGRIWVGHNPELQHRIFLALHDSSIGGHSGFPVTYRRIKALFAWPGMKKQIKTKVQECSICQQAKPDRSRYLGLLQPLPVPTGAWQTVTMDFVEGLPVSKRYNCIMVVVDKLSKYAHFLALSHPFTAADVAHLYMEDHDLGVTFPCILRNGLKS

SEQ ID NO: 204874 - protein, 43 aa, Oryza sativa
  Clone ID: PAT_MRT4530_99918C.1.pep
MWGLRYQGPTSQRLLECRPVLVPGRFLLRFSSGSRFFADVGEG

SEQ ID NO: 204875 - protein, 311 aa, Oryza sativa
  unsure (1)..(311): unsure at all Xaa locations
  Clone ID: PAT_MRT4530_99919C.1.pep
AFFLSCVLKIKKDNFVWEIVCVYGPVDNTLKNGFLDELSWHIQFRLHPVLLGGDFNMYXFASEKSNGNLDLRCMNMFINFITGLDLRELHRIGPRFTWTNKQDNPTQEVLDRILVTDDXDNKYPNSVLSSILRVGSDHIPILLDTCEGNIERSRYFKFESAWLAAENFKEMVTQKMPTRDDSYILEFWNKKQAELRRFLKGWGINAHCERVRGKQVLQKKLEMIEAKALENELSPDEWQERYALENNLEQLYEMEELYWHNRSGGQWILEGDRNTDYYHRIANERKKRCSITSLMDGDTELTSKENLKNHI

SEQ ID NO: 204876 - protein, 103 aa, Oryza sativa
  Clone ID: PAT_MRT4530_9991C.1.pep
KWTLHCALILPCRPKYIQFRIQKHSPHEKSAVQREIPRWVTAHRLTQLTSCIAQANNICYNKQTTLTSMSGHDYVTNTANAKFQSTTSLKPEDQSRRLRLVHK

SEQ ID NO: 204877 - protein, 113 aa, Oryza sativa
  Clone ID: PAT_MRT4530_99920C.1.pep
KQTRKRIRAESTQGTIATARTLKMRSVAIAPRADKRVTGRRGRYTAIQQDRVTAGGYTARGGTPKRLRSDEDQRRRNERAKERQKTEDGGKGEIRIFSTECRASRPHSGADHT

SEQ ID NO: 204878 - protein, 48 aa, Oryza sativa
  Clone ID: PAT_MRT4530_99921C.1.pep
SNVRNYLYCDDVAEAFEVVLHKGQVSHVYHIGTAKERRVIDEAKDISV

SEQ ID NO: 204879 - protein, 619 aa, Oryza sativa
  Clone ID: PAT_MRT4530_99922C.1.pep
MSMYGRDPWGGPLEICHDSATDDDRSRNLDLDRGALSRTLDETQQSWLLAGPGDQGRKKKKYVDLGCLVVSRKLFVWTVGVLLAAAVFAGLVAGIAKAIPRHHRPPPPPDDFTVALRKALMFFNAQKSGKLPKNNNVHWRGNSCMKDGLSDPAVGRSLVGGYYDAGDAVKFNFPAAFSMTLLSWSVIEYSAKYEAVGELGHIRDTIKWGADYFLKTFNSTADTIDRVVMQVGSGATSPGSTQPNDHYCWMRPEDIDYPRPVVECHACSDLAAEMAASLAAASIVFKDNKAYSQKLVHGATTLFKFARQNRGRYSAGGSDAAKFYNSTSYWDEFVWGGSWMYLATGNSSYLQLATHPKLAKHAGAYWGGPDYGVFSWDNKLTGAQVLLSRLRLFLSPGYPYEEILRTFHNQTSIIMCSYLPIFKSFNRTKGGLIQLNHGRPQPLQYVVNAAFLASLYGDYLEAADTPGWYCGPHFYPIETLRNFARTQIEYILGKNPLKMSYVVGYGNRYPKRVHHRGASIPKNGVHYGCKGGWKWRETKKPNPNIIVGAMVAGPDRHDGFKDVRKNYNYTEATLAGNAGLVAALVALSGEGHGVDKNTMFSAVPPMFPSPPPPPAPWKP

SEQ ID NO: 204880 - protein, 984 aa, Oryza sativa
  Clone ID: PAT_MRT4530_99923C.1.pep
MALATFPWLDLMAWRMDEYLSWIRRRLLRVATSLNGLLRTAASGAAAVIAAAPPVAATLSELVARKLSMDRATRFVGFLIMEVLGRQRCKVEEELGKGGVQESSTHNLFDRMPSQHKVFKDDERIAEPVPIKSTMNKEGISMDEALDRILERATTAVLKAKSPTAPMAPPTPAPTKCLTECPNNNLTWATASSSHITEDTAPTAAWELGNNKHKGHASCVVTKDSPEVTPTMCSTKCSGPTVEPDLTVAAVVTSATTVVASMELVAAGNAIGATYINNLDHPKVTHAKCSMSGSGVKRGTEQVVLAFPLMASPVEFTTSLVEPSPPTGLKLGAAICVGDQVPMKCSMKCTESDNKPLMEHPKRNPWPPAWLGWKKWYVSWTVVNYSDMRFYFIPPWPPPLKVGWLALVFSKFGAAHTDMMDIMLHWTDMKPWPPPNQNLRSIMVHLFAWKHWKVSVEVSLFAWNTKQYMNSVLLITVGTKWLIHSAVKDCFLQGKPFKLVDPLELMQVIFVLLVRDPDVEMFQIGSYSLQPENYQLTNYLVARLLKQGNLKKVLDGVDHSKNIKKSDVDVGEDNPGNISTAAKMFIDGLGIKEDSDMLCPSAQYIDNWSTKLLDEIRNGCNIYLLVALIDDELNPWCFLIDKIWYDILVLLFFTGATWKVESYALPIKDVIHMVVYFVQPLQGILLQTRQGKIENPVILDITSATQTVKFLLCYKSTIKIYPSCSSMVQISASKFRACGKENICYMLLLLVLNIGDCTFLRSTSYMLHASIACAEYWCLHFSEVVQHAICIGWIINWAILFWMEQAVCSPRIILQMPWDPGGGKLFIASGCRLGDKPDSKEGVLLGIGPAALRPNTMWLWEAVGADGWLWLRWREQRRRWRRQLGIGSEVVTRCLVGLLGSLPHPARQREAVLGEAQEGDMRRRGAVIAGERGGIGRVVRVHEGDDGGGGSRKAGEAVTVHDEVVAAAAGAARYGGQGDVCAGA

SEQ ID NO: 204881 - protein, 67 aa, Oryza sativa
  Clone ID: PAT_MRT4530_99924C.1.pep
MQSSPPPPPLTPSPTPPRQPQQPPPPPQLPPPQAASSKPHRDLPPEAPPAAPATQPRPRAGGGGGGG

SEQ ID NO: 204882 - protein, 1102 aa, Oryza sativa
  Clone ID: PAT_MRT4530_99925C.1.pep
MSRRAAPMMLALPAPPRLGWGGRTVVVVGVRDDAEGRELLTWALAMVASAGDRVVALHVATPPAAADQEGAMRMAARRIRATESLAALLRAYHDFCDLNQVPAHRPHISLELRICHGSSIKKALVNEASSYGAAHLILGVTNNSRSHLRPSSSSSATIAKYCAKRVPPSCSVLAVGNGRVVYRRDAAQQQLNQCISPLVETPRRIYRKIYRKLVRAATTITREKSQDDAAIAGGGRHLRRNISTPTSAPVSPVVAFTPRQAEVAAGWPLLSPDLKSALPEWTEMSVARWAMQLPSRCPAPSPLNPRNNSGDQATSPAITASETPSPATDEAAEQVAQELASLRNKYSSKAARFVGFLVIEVLGRQQCKVEEELGKGGVQESSAHNLFDRMTSQHKVFKDDERIAEPVPIKSTMNKEGISMDEALDRILEKFELMEANRRQEEKFNQILQKLEEVEARRSKAAEETIASIRATTAILKATSPTAPMAPPTLAPTKCLTECPNNNLTWATASSSHISEDTATTVPWELGDNKDKGHAPCVITKDSPEVTPTMCSTKCSGPTVEPDLTVAAVVTSATTAAASMELVAAGNTIGATYINNLDHPKVTHAKCLMLDLSSNSGADQTVVTFETLVDMTKGVFAPDATIEGSSPRKIVEIDLVIVMPTGCSMLFFDKGASELLPVRGHVMWQLLLEQCKRNPWSPPNSVYQVNGIWELWHVPWLDFNYFRTRLSLMPPWPPSTQIGTIMLWLVANSWLRVVELKPWPDPQSSQCSTGGRWTELKVPWSAPDCECSMGDDFCSANCIRNEALSVALSCAPKGDLNHEKIDGSQKDTLVALLILEHFHYVGDEEKVTQGMLNGLIAVGCNYLILIMCAAIITTTFHLAMITTQGNNVYGPNQLHEKLIPRLIPLTMRGLPLPIHAFEVVLHKGQVGHVYHIGTAKERRVIDEATDISVRDSILWPKLKHVDVLEDGNNRWTRDFSSRSIVLKGRQDCGLCWCALDVIRDVKVDLVLQLLKQYGSAKLVIINSLSIPWDPGGSRVTLAGHSSCHIGYITREALTEEIKYKSLHQTYPLVKFPHLRSSAWGQTKFQEMGIVRKSCGLQCGPVQ

SEQ ID NO: 204883 - protein, 209 aa, Oryza sativa
  Clone ID: PAT_MRT4530_99926C.1.pep
MGNLISSGAVVGASGGGKVVMADGSVRALSEPVSVAELMMDHPRHFVIDARDLQQQRRHKGKAGAPPPPGGKVAPLPADHVLGAGGVYVLLPATTRGKVSAEEARRALTASRSLERSRSMPGRLRRKLSSKKMTQEADNDGNASENHAAAAEAERREETAAAARPPPADGFEEHRPEFLSRELSSRGWKPSLITIEERVAPKKVSHWLF

SEQ ID NO: 204884 - protein, 421 aa, Oryza sativa
  Clone ID: PAT_MRT4530_99927C.1.pep
MEARLRLLVVVVVVAGHCAAVASAAGNSSVVGYHGDPTFNVRNYGAKGNGQTDDSKVAEEQSIDQASSLVELSPSFLANCEVFVRDMQALMTAWKAACAATGAVTLVLPPGTYYIGPGTLKAATDLKRFGNDWVEFGWVNHLIVSGQNGAAFDGQGAASWPFNKCPIRKDCKVLPTSVLFVNNKNMVVQNVASVNSKFFHMALLQCSGAKISGVKISAPESSPNTDGIHIERSNGVSIADTTIATGDDCISIGQGNDNIDVARVHCGPGHGTGVGSLGRYVGEGDVTRIHVRDMTFHGTMNGVRIKTWENSPTKSNAAHMLFENLVMNDVQNPIIIDQKYCPYYNCEHKFVSGVTIKDVQFKNIKGTATTQVAVLLKCGVPCQGVVLQDVDLRYKGNGVSSSKCENVRAKYAGFQNPKPCP

SEQ ID NO: 204885 - protein, 294 aa, Oryza sativa
  Clone ID: PAT_MRT4530_99928C.1.pep
MSVARAARFVGFLVIEVLGRQQCKVEEELGKGGVQESSAHNLFDRMTSQHKVFKDDERIAEPVPIKSTMNKEGISMDEALDRILEKFELMEANRRQEEKFNQILQKLEEVEARRSKAAEETIASIRATTAILKATSPTAPMAPPTLAPTKCLTECPNNNLTWATASSSHISEDTATTVPWELGDNKDKGHAPCVITKDSPEVTPTMCSTKCSGPTVEPDLTVAAVVTSATTAAASMELVAAGNTIGATYINNLDHPKDKIIFDATLATIDSNWNHNALAGGKLMAEGGRAETVA

SEQ ID NO: 204886 - protein, 82 aa, Oryza sativa
  Clone ID: PAT_MRT4530_99929C.1.pep
ALVQFANNQINYYYLNVELTNQQDINSVAGTIRETNTALEAATFPGGYPRRFYTDCNSDHRLPGKDGVITDGASGIDPATAK

SEQ ID NO: 204887 - protein, 100 aa, Oryza sativa
  Clone ID: PAT_MRT4530_9992C.1.pep
MSKRTLLTYYSSSSNTDPSPSTENLSQPKRPRAEFSQSDIIGDPGLRKPIEVYPPEIRDQVKRAYALSGPTQPNITIFPRKWQGGEWRSFQKTWFNEFDW

SEQ ID NO: 204888 - protein, 169 aa, Oryza sativa
  Clone ID: PAT_MRT4530_99930C.1.pep
MEARLRLLVVVVVVAGHCAAVASAAGNSSVVGYHGDPTFNVRNYGAKGNGQTDDSKALMTAWKAACAATGAVTLVLPPGTYYIGPVQFHGPCSKATTMTFLMQGTLKAATDLKRFGNDWVEFGWVNHLIVSGQNGAVFDGQGAASWPFNKCPIRKDCKVLPTSVLVREQ

SEQ ID NO: 204889 - protein, 414 aa, Oryza sativa
  Clone ID: PAT_MRT4530_99931C.1.pep
MASCELLELAEKERRREGRWGRSARRPRRAATAWEARRRGGGPGGGAAWEARRRRHGGRRREGGGAVRREGATRFVGFLVIEVLGRQQCKVEEELGKGGVQESSAHNLFDRLTSQHKVFKDDERIAEPVPIKSTMNKEGISMDEALDRILERFELMEANRRQEEKFNQILQKLEEVEARRSKAAEETIASIRATTAVLKATSPIAPMAPPTPACTKCLTECPNNNLTWATVSSSHISEDTAPTVAWELGDNKDKGHAPCVVTKDSLEVTPTMCSTKCSGPTVEPDLTVAVVVTSATTAAASMELVATGNTIGATYINNLDHPKVTHAKCLMLDLGSNSGDNQTMVTFQTLVDMTKGVFAPDATIEVSSPRKIAEMDLVIVMPTGCSMLFFDKGASELLPVRRHVMWQLLLEQCK

SEQ ID NO: 204890 - protein, 98 aa, Oryza sativa
  Clone ID: PAT_MRT4530_99932C.1.pep
TFHLAMITTQGNNVYGTNQLHEKLIARLIPLTTRGLPLPIHGNGSNVRNYLYCDDVAEAFEVVLHKGQVSHVYHIGTAKERRVIDEAKDISSITSIFP

SEQ ID NO: 204891 - protein, 253 aa, Oryza sativa
  unsure (1)..(253): unsure at all Xaa locations
  Clone ID: PAT_MRT4530_99933C.1.pep
MESMSIEEYISTLHRRRRPHGIAANDAPEDVVGDRAGDGGLLQCQRRGVGDLQVAADKHQERAEQLPVHGQLPRHQLRQRRRYRWCRGDDGGGAARRRAEQXPFSDVATRSSLRRIHDRYSSILHAIKSSHGKVARAIRKVSRACXVVACDAAAATSVAVAAHLLFFGLIVGVPGPLFPAPLRPPPLLPRRFAAGTAWPAGPAGERRGREXDRGRGIERRVVRMTGFYYFWIKLPRKRHVNATSDEYRVKLAT

SEQ ID NO: 204892 - protein, 199 aa, Oryza sativa
  unsure (1)..(199): unsure at all Xaa locations
  Clone ID: PAT_MRT4530_99934C.1.pep
IEQPLFELSASRGEFYKPPPSSERIYTTGYEIRSELISMDRENPFSGFDLENPYHHLRDFEQVCSCLKIRGMRQETLRWKLFPFSLQERAKQWYTSTVRCVNASWEKLRERFCLAFFLDTRITTFRVEILSFQQIKNKSIGAAWSRFANLVQSGQTLXYVLLQHFHTGLDKESAFYLDSLISKSCAHNPPLSGFSWHIN

SEQ ID NO: 204893 - protein, 73 aa, Oryza sativa
  Clone ID: PAT_MRT4530_99935C.1.pep
MASDHMLCGFAGGICERKGVCRWTLEIDRSAALHLAAQGAVLRTSKAKIPVTYSPDGRDITTLDQGAFKIYTP

SEQ ID NO: 204894 - protein, 664 aa, Oryza sativa
  unsure (1)..(664): unsure at all Xaa locations
  Clone ID: PAT_MRT4530_99936C.1.pep
MPSRLLQQLPPPPPPPPLNRRHHHLLLAASAAAATATALLLLLLLLLVALYLRSRRARRRSPTLPFSPPPAPARPLRRYSRRALRRATGGFHPSRLLGRGAASPVYLATFPDAVASPDRGKTDASVPPGKRKALPNPLFPFRARVFRGPFWVPPPPGKGGFLPGPPRLVSLLGYSGPGGGADDRPLLLVFEYLPHGSLQAALFGDARDGRFLDWPRRLAVIRDVARALAFLHAECQPPVVHGDLKPSNVLLDADFRAKLADFGLARFKTPDAIAASGAGADDFMSQELGEAGELFSTACAAAAGGGVKADAKDESGPAAAWGKEWWWKQDGSGELDSRDYVAEWIGSQICPARNPDWXTTTTVTPTITTRTHPPARTSTPWQPRRRTRRTPTATAMLAAAATRNQRRPRXREWWKEEFFEEMSKKGGSFDKRRGGGGGGGGKPWLRSISMNTGNGNANGDGGNNIEATSGLDISSFRRNRKRSRRRGRSVGSGDMHSGDFLSRELSTTTSMRGTVCYVAPECGGGPCEHGAELLEKADIYSFGVLALVILSGRRPLHILSSPMKLEKANLVSWCRQLARAGNVLELMDERLDGGYDKDQATLCVQLALLCLQRQPEQRPDSTDIVKILAGEMDLPPPPVDYSPSPRVRPFPRSSRRAQPPDATE

SEQ ID NO: 204895 - protein, 72 aa, Oryza sativa
  Clone ID: PAT_MRT4530_99937C.1.pep
VRSNKIQYRGLVSRGSLIYDEIGTSRCRLPSPCYGQRRGSTCTRPPLLQRHPLMRRISSPVLTRTSILDGFL

SEQ ID NO: 204896 - protein, 642 aa, Oryza sativa
  Clone ID: PAT_MRT4530_99938C.1.pep
MRAAEERKGVVPAARRRDQFPVGMRVLAVDDDPVCLKVLETLLLRCQYHVTTTNQAAIALKMLRENRDMFDLVISDVHMPDMDGFKLLELVGLEMDLPVIMLSVNGETKTVLKGITHGACDYLLKPVRIEELRNIWQHVIRRKFSTRDRANLDFYEECNKPPNADSDHVHGHVTCGSPDQSGRPSKKRKEYCSEEEDEGEVNTQDIDDPSAPKKPRVVWSVELHRKFVAAVNQLGIDKAVPKRILELMNVEKLTRENVASHLQARNSFHYLLFISMYCPRNNPAALGTQGVPASKSIQTMSGSHTLSHSINDANKYHLSLPGNQKGNLGQGLATSLGQTQMQQKWIHEETDDLSTILSGNGLSNGMSGTLQSVTSSPLLPQELAECTQAKIVSQPSIRTSSVSSEHIEGAVGVSSGLLESRVSQQSTIPLSGFSANGLLIHGSFNNTCANKLGGTSSSCAPARSSNDLMVARDTKGGASSFGGAMLLPPDTEQKYLNFGGGNGLKQKFDDRTADSLFDLKFVWSSVPSSQLASNIGAHHAMSQRWNNSSSNSSNIGARMIGQATSSGSTVIPQMKTDFLVSGDMAMPKNASDLSIPKLQSELSSSSCSFDGLLNSIVKVEKDDVTFSDDLGCGDFYSLGACI

SEQ ID NO: 204897 - protein, 55 aa, Oryza sativa
  Clone ID: PAT_MRT4530_99939C.1.pep
SSSVDFQRAIYIWYLPYVLWCTQYHWDPWRCLVTHFNRIVDQKLKISANFIVCDM

SEQ ID NO: 204898 - protein, 75 aa, Oryza sativa
  Clone ID: PAT_MRT4530_9993C.1.pep
RLRLLHLARHTHFRAEPRQAWHTSFLHMWLTIAVQAWVLNANVTAPSFSIVPSIHQLPSDVCGLNKAAVRAASSP

SEQ ID NO: 204899 - protein, 219 aa, Oryza sativa
  unsure (1)..(219): unsure at all Xaa locations
  Clone ID: PAT_MRT4530_99940C.1.pep
MATPDHLFNLRNNLYLGAYQAAINSGDVTNLSQEDSLERDTLVHRCYIALGQLQFVISEIHDDAPTPLQAVKLLALYFSSPDTKDSAIASLKEWLADPAIANNATLRLVAGLVFLHENDFNEALKHTNAGGTMDLHALNVQIFIKMHRSDYAERQLRIMQQIDEDHTLTQLANAWLNLAVGGSKIQEAYLIXQDLSERYQSTSLLLNGXAVCCMHMGNF

SEQ ID NO: 204900 - protein, 417 aa, Oryza sativa
  Clone ID: PAT_MRT4530_99941C.1.pep
MGGAYNLKLLAALSALVLLLAASRPFLPGLLEAALRAPVLPRDLLPLLPWPVAQPLLRRLALRGAADLLPSFVGVAREPDDGGARAAEWKGACFYDNRAWMEFHNGTDGGLGGGTLHLESASFNPGLDQKWVTGAYAGHTAVCLRDSEGKLWVGESGHENEQGEDIIAILPWEEWWDFEVKKDDSNPQIALLPLHPDLRAKFNETAAWEYAKSMDGKPYGYHNMIFSWIDTISDNYPPPLDAHVVASVMTMWNKLQPEYAANMWKEALNKRLGTKGLDLPEIIVESEKRGMTFDKLLTVPEQDKWVYTDGQSASCVAYVLMMYKEAGLFDPIASSIEVTEFTIKDAYSLNFFENNMTRLPVWCNKDDSVKLPFCQIKGRYRMELPGYNTMQPYPHMNERDGIPCPSLPPNYNRPRNC

SEQ ID NO: 204901 - protein, 615 aa, Oryza sativa
  Clone ID: PAT_MRT4530_99942C.1.pep
MHASFASWDEEENSMLRILVATDCHLGYLEKDEIRRFDSFDTFEEICSLAVINKVDFILLGGNLFHENKPSISTLVKSMEIIRSYCLNDHQVQFQVVSDQAACLQNRFGRVNFEDPNFNIGLPVFTVHGTHDGPAGVDGLSATDILSACNFVNYFGKVDPGSSDVDQISVCPVFIKKGATSVALYGLGNIRDEKLSRMLQTHYKIQWMKADSEDDWFNLFVFHQKRRKGSSTNGINEQLLPSFLDLVIWGHEHECLIDHQEVSGKDFHIIHPGSSVATSLSNAEAKPKNVVLLEIKGMQYKQTNIPLKSVRPFQYAEVQLKDQLGVELNNEAALYEHLDNIFSAVLLNTELFQVSNLIDKTAISGSEPKLPLVRVKVDYSGFSTITPQRFGQKYVGKVANPNDIILFSRSAQQNRTREHTGSSEECEPNELDQQSIEELIAESNLNMQILDKNDLDSALHDFVNKDENMAFHSCLDKNIDAAKKKLTFATKDLKAEEDIVLQLDQCMQERMNEDPLLSKGGSEIMPCSQSLPTNALSAFQELKCSSNEEQDTHESDELIEISDKEHSQQASQKRPAPVDGGSQSSRRKTDLSSFYRTAPSKNNDDGGKKGKAPVI

SEQ ID NO: 204902 - protein, 63 aa, Oryza sativa
  Clone ID: PAT_MRT4530_99943C.1.pep
MKKNQIHEFLPKTYVHAQSGGKWQSLQEGGFLQSSGGGTKLERNTICPMQASTHRLLKSNGNK

SEQ ID NO: 204903 - protein, 174 aa, Oryza sativa
  Clone ID: PAT_MRT4530_99944C.1.pep
MGVGKTSAPTGVVVESGGERGRPRLPRRLENSAPARLGGGGGGGEARQRRRHAARSKRHGLCRVHGRRCRRFQVSSLRKRQGSGSCPSQRRREHEGGDRGLYGQIADSTSTVIASATVGDYASRSADSPRLANECPRAMGKDNVSGRHDLPHNGMKTPSPGHGEMPLDAIAKNR

SEQ ID NO: 204904 - protein, 71 aa, Oryza sativa
  Clone ID: PAT_MRT4530_99945C.1.pep
MAASAGLDRRERGRASIQALIIGEGERRHGCGGTETGARRRLYPLIGHRRRFGSAVDVSGVRWRLTSAAVA

SEQ ID NO: 204905 - protein, 346 aa, Oryza sativa
  Clone ID: PAT_MRT4530_99946C.1.pep
MNWPASPLCPPVMAPSIVGFAPPSPTHPPRQPSEQIDEEVQEVTIPDADGTDPVEVDSASVDLGHGLSASEEEFNRGSYFGVPVTNFVSAQGSMEDGYFTNLMNEGGNTFNWSAEGSQPDYPKIQCIKVGKGKHLRDLTKKAWVNVSMDAIQGADQSRSAYWNRICDFFHANKYFSSDRSQNSLMHRWSTIQECLNTFAGCVSRIENRPQSGANAEDKVLRTVSLKRKRTLLQLMLCSLREDLQGGRKREKQRQRSDQSKIDALDHLWAKKKEADAEKERQREERYRAALALEQQRINLEKEKLDFKRMIEEDRLLRLDTSAMSIEEQEYYKSVKTSILSRRSAST

SEQ ID NO: 204906 - protein, 511 aa, Oryza sativa
  Clone ID: PAT_MRT4530_99947C.1.pep
MWLTRVLHIIPTFAMGCFELTKDLCDQISKMIAKYWWSNQEKDNKMHWLSWNKLTLPKNMGGLGFRDIYIFNLAMLAKQGWRLIQDPDSLCSRVLRAKYFPLGDCFRPKQTSNVSYTWRSIQKGLRVLQNGMIWRMGDGSKINIWADPWIPRGWSRKPMTPRGANLVTKVEELIDPYTGTWDEDLLSQTFWEEDVAAIKSIPVHVEMEDVLAWHFDARGCFTVKSAYKVQREMERRASRNGCPGVSNWESGDDDFWKKLWKLGVPGKIKHFLWRMCHNTLALRANLQHRGMDVDTRCVMCGRYNEDAGHLFFKCKPVKKVWQALNLEELRSMLEQQTSGKNVLQSIYCRPEIERTSAIVCLWQWWKERNEEKSPRTGECAVWRRPPLNFVKINTDGAYSSNMKQGGWGFVIRDQTGAVLQAGAGPAAYLQDAFHAEVVACAAAIKTASERGMSRIELETDSMMLRYSPRSCNKVAHELAAYGCNLQTVSSWAGCPPGLERLVSSDSAGLVI

SEQ ID NO: 204907 - protein, 113 aa, Oryza sativa
  Clone ID: PAT_MRT4530_99948C.1.pep
ARHGPTEVGPVPARPNHRAVPGPLHRHVGPARHDRPTYEIAQRGGTKNRLILKKFQWATHDFGPARHGPTAGVPCLGGRCSPWAGHGPARSCWAVPSRAWAGPCRAGPLAIYT

SEQ ID NO: 204908 - protein, 453 aa, Oryza sativa
  Clone ID: PAT_MRT4530_99949C.1.pep
LIKKELQKKHHELMDCFHSKQMSNVSYTWRSIQKGLTVLQNGMIWRVGNGSKINIWADPWIPRGWSRKPITPRGANLVTKVEELIDPYTGTWDDNMLSQTFWEEDVAAIKSIPVHVEMEDVLAWHFDARGCFSVKSAYKVQREMERRASRNGCPGVSNGESGDDDFWKKLWKLGVPGKIKHFLWRMCHNTLALRANLHHRGMDVDTRCVMCGQYNEDAGHLLFKCKPVKKWWKERNEVREGGTPRSPAKLSHPIMSRAGEFVRMNAKDKNPRTGECAVWRWPPLNFVKINTDGTYRGNTKQGGWGFVIRDRAGSILQAGAGPAAHLQDAFHAEVIACAAAIKAASERVTTLSITRTDGTMNRSNPARNFNKRLARRSDDERFRGGTRDDTWKGMGLSNWSWNGVAAAPAVDASSICSSAMLGVNQGGRDLGENFFERAGGNEEQTAAAAACDA

SEQ ID NO: 204909 - protein, 310 aa, Oryza sativa
  Clone ID: PAT_MRT4530_9994C.1.pep
MERAVPVRKTHASTAGLLSWSESPGPDNAAAAAGAAAPPSSRPSLKPAGGITPAMFGAPVTDLEAEDLTKRKMCSGSKMKEMTGSGIFSAQGANGDSETGSGDSNPPSKTSLRMYQQTVTGISQISFSAEGSVSPKKPSSLPEVAKQRELSGTLESEADAKLKKQNSEAKSKELSGSDIFGPPPEIPSRPLAARNLELQGNLDFALPQPRSIHTSVKVSNPAGGPSNIMFGEEPAVKTAKKIHNQKFHELTGNNIFKEEAPPGSAEKSLSTAKLKEMSGSNIFADGKVASRDYFGGVRKPPGGGSSIALV

SEQ ID NO: 204910 - protein, 147 aa, Oryza sativa
  unsure (1)..(147): unsure at all Xaa locations
  Clone ID: PAT_MRT4530_99950C.1.pep
FLLVAKTPFLGDSLPYSALLRDIDADVTGRITMSKELGYGPDRVKDLGPFSEQTPSDLRGEFRDDYGWDTAGLYGDPEAFARHRALEAIHGRWGMLGALGCITPEALXEKGVRVDLKXPCGLRSGPRYSPTEDSTTLATPTWCTRRA

SEQ ID NO: 204911 - protein, 446 aa, Oryza sativa
  Clone ID: PAT_MRT4530_99951C.1.pep
MSYPATIRGSHSVPQRASTAQPSRRRRYPSSEAGEHDIFTTPQNKMIAAKALLDNMPVPVNLAVNTTIAQVKAMVEAAVVVNDQISIKSTGTPLNPRARFRTCTEVKQSSQASSVVNGTIAEHQANGPVFLPEGGFPPYRELVTGTQQPVSGVALGQPMASASALGRPGASSSAQRQLLEPYLLSRHQPGHTWHNIPRLTPEQIAAMFKNNQQTIEPIQPIPMGQQTPTIPQPQPVGNQFVPGQDNVSTYEHVSRFLAQCGEALAVDALRSWADLEKQFHSYFYSRNHEMKLSDLTAVRQRHDETVHDYIQRFRDMRNRCYSLALTDSQLADLAFQEARKNFKKVNHVYPYMYESEEDDSEVAAAEWARSKEVVTCQWVKSSRKEEKYDFDITKADKIFELLLREKQIQLPAGHIIPSAEELGKMKYCKWHNSGSHTTNDCKVFRQ

SEQ ID NO: 204912 - protein, 1463 aa, Oryza sativa
  unsure (1)..(1463): unsure at all Xaa locations
  Clone ID: PAT_MRT4530_99952C.1.pep
MASENATAPQGGATGEKEAAALGGAMACTTTTGARTRWRRPRVCILFGRSHHHHHRRPKSPVHVWAIVDADCSRQDAAGAGRHLPVQGACPRQSVQINHPSVLLVASAAGTGMEAWSVEEMRRRGKERLVDASRRGEVVPIHQVFDRIRQETQVTAPASVVDEIDKAFKKLELAAATTSLERWSELPSPLSPLANTTPSELQLDFMTGHKNPLQVGSQAVAIQPGPGELVSGLASKAAPGGLSGASILAAQDGGTSPALPAMSSPSRQGAPVYVAFVAGAGTGAFIRRRQHAFAITTCSLRLVPRQRRPRRHRGRHRTSWMHSSRRFGRKTRKTKESEFSLTNPRRSSRLAGKPAMPTMQKCSRVLMKRLGLLRTDTSLDEVLAEYVAMFDGPLPPQTVAALTSIFDLDIDDDGDQEQPPEEALLAVRHCPWDLCCIVLQAGQHLRASHPFMINQNIELLSWNVRGLNSPAKCTVLHELMVDTACSIACFQETKLRAIDDVLARYLGGYKLDSYAIKPARGTRGGILLLWNSNSINITEVRLRRYSMTAKVSLLHTADSFTISAVYGPTRHREKEIFLRQIRRLKPANNEPWLLFGDFNMIYRACDKSNSNINLRRMRRFRAAINHCELKEIHLQNRKFTWTNERRHPTMVRLDRFFCNENWDLAFGHHILHTLSSGTSDHCPLLLSNPQGPQRPRTFKFENFWTKLPGFRTEVQLAWERTSTHHEPLHRLADKLSHTALALKKWARGICSEVKLKFHLALDVIQRLDVAQENRDLTQAEFRLRLGLKRRLLGYAAIERARKKQASRITNIKEGDANTKYFHRKVNARKRRNHIFRLRRQNGWAVTHAEKEGVIADHFRQVMGRPEPRTSDLNWPSLDLAPTDLTRLEEPFSEAEIRKAINEMPGDKAPGPDGFTGKFFKSCWDIIQVDVIAAFNALHNMRSVHLNLLNSANVVLIPKKDGAEGINDFRPISLIHGFAKLSSKVLAIRLRPLMQSLISPNQSAFIRGRSIHDNFMYVRNMVRRYHKTRRPILLFKLDISKAFDSVRWADLLAPLQNSXGLPQKWRDWISGLLSTSTSKITLNGIPGETIRHGKGLRQGDPLSPLLFILAIDPLQRLLDKATDIGVLSKLRGRAVRFRTSMYADDAAVFINPTKEDVSAFADLLNRFGKVSGLCTNLQKSQVAPVRCDNLDLDDILHDTPATRASFPMKYLGLPLSTGRLRKVDLQPLYDKSMSRVASWRGRHIGLAGRSTLVKSVLTSQPVFLLTGLKASNESLEVIDKQRRKFLWAGGEALTGGKCKINWARTCLPTASGGLGILNLEEFARALRLRWLWNEWRSPEKAWVGSGTPCDDTDXWLEGRRLKDVAPLIYVASKKKNSTLQQASATDQWLLDLDLPPASGWTMEXENEEDKIVWKLTSHGEYTATSAYKAQLLDTPKKLLSTSSQNANTPGKFGRRYLIGLGVVN

SEQ ID NO: 204913 - protein, 123 aa, Oryza sativa
  Clone ID: PAT_MRT4530_99953C.1.pep
MARLFAVCFVILSFAMAAAAARPATSSTADAPATSGDCSSDVQDLMANCQDYVMFPADPKIDPSQACCAAVQRANMPCVCNKVIPEVEQLICMDKVVYVVAFCKKPFQPGSNCGSYRVPASLA

SEQ ID NO: 204914 - protein, 101 aa, Oryza sativa
  Clone ID: PAT_MRT4530_99954C.1.pep
MAAYPSSLLFRPSRSLNSACGQGSVTQFVCQTVERLMMRRCSFPSQLDLSPESRKLCPEVFKFEDRGNGEAVRRMKEADFCRHRVATQPHFCDVDRVGVPK

SEQ ID NO: 204915 - protein, 98 aa, Oryza sativa
  Clone ID: PAT_MRT4530_99955C.1.pep
LPNHFFYFFFPPCRSRGRGDTGGDRRRGATTPTPSLRLAVTRAGRRQPHGCKDGGGKASFSLHGHRVGANDLGQFRAGDSRSGDRRMQGGVTARRPGR

SEQ ID NO: 204916 - protein, 1399 aa, Oryza sativa
  unsure (1)..(1399): unsure at all Xaa locations
  Clone ID: PAT_MRT4530_99956C.1.pep
MFGSLELSTNQLSFDEFDNNIYILTSGASATAITPSSTNIFINQGALHQSFMYVRNMVRRYHRTRRPILLFKLDISKAFDSIRXDYLLALLQNRGFPXKWRDWIFGLLSTSTSKITLNGIPGETIRHRKGLRQGGPLSPLLFILAIDPLXRLLDKATDIGVLSKLXGRAVRFHTSMYADDAAVFINPTKEDVSAFAALLNRFGKVSGSCTNLQKSQVAPIRCNNLDLDDILHGTPATRASFPMKYLGLPLSTGCLRKVDLLPLYDKSMSRVASWRGRHIGLAGRSTLVKSVLTSQPFFLLMGLKASKESLEVIDKQRRKFLWTSGEALTGGKCKINWTRTCLPTASGGLGILNLEEFARALXLWWLWNEWRSPEKAWVGSGTPCDDTDRLLFAAATTITIGDGAKASFWDSAWLEGRRLKDVTPLINAASKKKNTTLQQASTTDQWLLNLDLPPTSGWTTELVSQLINVXSAVHNVHFTENEEDKIVWKLTSHGEYTMTSAYKAQLLGTTATNFNILIWKPWAPRKCKTFAWLIIQNRVWTSDRLTLQIDYRQITSVLGINMSKRKVLEQGTSNVFDRPQYPFANPEISDGSDENFREDDTESDDDFDMDYVMLELYRKTIVQSMKRKMKKNSNVLLENQKMKKQTCLTKANSSFSRFSAKYFSEVIADLSGPQRFIIEKYGFANLLLFDVKSAPKKLASWVAKRFDLSSSEIILRDKVIPVTEHSVTVVLGLPTGRRDFGKNFDIGKEIILSRFGLSVLPSVKFFGDLLKHNKDMAEDKVITCFLIVALACFLCPNSSLVPSVKYLTIFEDIKALDSYNWSKFVYEWLLIHIKKFQKSKNLGGCLHIWAILYLDFVDFDKIDDTTYGLRPLKMLHDSSSSETVQLDSHNIAHTATANASFQTDKQHVGFNNHSFQFNEKRTPHSKSYAEHSVGNHPLSTEDFAPSTFGCGQASASLSAQAQMYHTPEVGLIKNKKVCLDESFNASAATAAIDAVKDVAKKIRSRMAYLKSKEKMNRIFDGTKSLSLRFLIPKILEIVTIALNSNSFHPNVRTYNNLKTLSNNKDKGKFDAEFVRKRAFQDLTNSPDVVCLGSNTCSNKTKNMSIKSEHIYNKSNQFDSNYKVFGSGFNNSEASSSGGRLPPHGPRRPLKPSRHASDPFVPVRRRFLVSEQENKYFTAICCLAHTRWQSLFAVNIDNVRITFSNFGNSLRIGGDVSNYVISAFCRLMFHNNHPSKSKKNYFFSSIGYQLLKKIECIEMVKIKKCFDGAASARKLHLCDMDRMLVFLDSLHHKSDPYFDPIIPMMIKNIQTLWDKFEGTAIDFSNCDSGIFVMKCIELWSPRVVLPNEFSKDDINNIRVQYTNKIFFHHKNIMLQSESEQLVVNWVENEEFQYEDEVATD

SEQ ID NO: 204917 - protein, 89 aa, Oryza sativa
  Clone ID: PAT_MRT4530_99957C.1.pep
TRRRRRRRRLHCGSTPRLTRRRSSHGRPTRASSGSSAATPTRTSTRHAATSLTRYLPHPWYRAICVACADRPVGIHLRQAGGRPPAPGA

SEQ ID NO: 204918 - protein, 642 aa, Oryza sativa
  Clone ID: PAT_MRT4530_99958C.1.pep
MAIVVVGGGRKGESSHGCWASPCPWRVSIARDKDQERLLLASSFCIASLLFFLHSLFHVSLFIWFEESKVSSEGFGKGSHYADFKNQQEWAFRCPTEGFSGNTTKRPSRLSELESRVSQLQDELKKAKEQLSLSESRRRHTQQEAEEAKKQEQAATSKLEDLQRQLAEFSAAEESRLQELRKVSQERDRAWESELEAVKKQQSVDSAALSSALSEIQRLKQQLGATTESDAARAKQCEFAESELEGLKQEMELRLATIEGLKVNVGESDKAVAEANAVAAETKKQLEMAQATIDSLLAEGARLQECLRSKDAELGQSMARLATLEEDLKKAHNKDDVDGSFGSPDHGEAVEKVVVTIPNGNGSCGGSGAEIEQLRTALEVAEIRYQEEQTRTTIETKTAYEMLENAKSEYDRRVRDLELELKSKNDELTEAKATLAVRCDGKSDVMQPELEAKLMKSITDATELKASLMDKETALQSVMEENETLKSEAGKKAAEVQRRYEAAVAELELAKAAEQDVRMRLGYVTEEADKSSRRAARASEQLDAAQAASVEMEAELRRLRVQSDQWRKAAEAAAAALGGGGGGIGRNVERTGSLEPAEYTNSMIGGKLASSPFSDEPEEESPKRRNSGVLRRMSGLWKKSPK

SEQ ID NO: 204919 - protein, 191 aa, Oryza sativa
  unsure (1)..(191): unsure at all Xaa locations
  Clone ID: PAT_MRT4530_99959C.1.pep
MQTSKTRNGPSDAPQKASPATPRSSRVAKTGGNETDSAGITPTRTTPERSPKVTERRSPRSPITEKRPSRLSELESRVSQLQDELKKAKEQLSLSESRRRHTQQEAEEAKKQEQAATSKLEDLQRQLAEFSAAEESRLQELRKVSRERDRAWXESELEAVKKQQSVDSAALSSALSEIQRLKQQLGATTES

SEQ ID NO: 204920 - protein, 102 aa, Oryza sativa
  Clone ID: PAT_MRT4530_9995C.1.pep
IQTTVIVNVHLQKMKDPCQTCQQIEQFQLKIRACEEASDRLGMWKVCMVLECTSSLADLLSPGISLPTDQVPSTHHIGLAYKSPCPQHCIQSPLEVCMAHIA

SEQ ID NO: 204921 - protein, 59 aa, Oryza sativa
  Clone ID: PAT_MRT4530_99960C.1.pep
LEYFYKKTRRGGGEEIITFGLKAKAIEMGHNQTGKKKFLAFFILVYYQPSPKKRGLLLF

SEQ ID NO: 204922 - protein, 61 aa, Oryza sativa
  Clone ID: PAT_MRT4530_99961C.1.pep
RPRVRTFKHTDTNKKPIDCPILPLPTHLLLELHLLMGPVHHYAPAIAATSDDMTYNAFSHH

SEQ ID NO: 204923 - protein, 628 aa, Oryza sativa
  Clone ID: PAT_MRT4530_99962C.1.pep
MAEAPVHPSSSKNHEKEDVGDTNISSTDDACVQKLEPVIGMEFDDEDIAYEFYNRYAGDVGFSIRKFWHDKSSTNVIRTKKFVCSREGFNKRNTSDACQRKRADTRVGCMAEMTIKITPTGKYAIASFSNTHNHELITPSKAHLLRSQRRMTEAQKAQIDILNDSGVRSKEGHEVMSRQAGGRQSLTFTRKDYKNYLRSKRMKSIQEGDTGAILQYLQDKQMENPSFFYAIQVDEDEMMTNIFWADARSVLDFDYFGDVICFDTTYRTNNYGRPFALFVGVNHHKQTVVFGAALLYDETTSTFEWLFETFKRAMSGKEPRTILTDQCAAIINAIGTVFPNSTHRLCVWHMYQNAAVHLSHIFQGSKTFKNDFGKCVFDFEEVDEFISAWNKMIEEYNLNDNQWLHHLFEIKEKWALVYGRQTFCADMKSTQRSESLNALLKRYLHVIDSAKHGEHGFLVKFDPNEIKVSCSCKKFEFVGILCRHALKVLDHNNIKELPSEYILKRWTKYAKIGSSQANRKCANDEDARVVLARRYGSLCRSYNNILSKAAENEEAYALLERTSLELMEQVDQIMQANKSEGKSKVDRNAGGTSTTSEVIPNFTVSNENDQMPSEVPNDPSENLQDKHF

SEQ ID NO: 204924 - protein, 82 aa, Oryza sativa
  Clone ID: PAT_MRT4530_99964C.1.pep
MALDPFAGPRRYRMGGIGANAAPGLGSCEATSRSLAFEESAPRALPRPVPRAVVVVASPDPPQPPWSSSLLPATATATPRLR

SEQ ID NO: 204925 - protein, 99 aa, Oryza sativa
  Clone ID: PAT_MRT4530_99965C.1.pep
VYGGGPIRRWVEKRVVSHLFKIFFQEGIAENCPVVINRGPPKDELAFRVGNPGGLVNPQTGEKWDILIQGAKGAPPGRDPGQGVKKIRFLGGGGGMGQK

SEQ ID NO: 204926 - protein, 127 aa, Oryza sativa
  Clone ID: PAT_MRT4530_99966C.1.pep
NSKRGSNNFYIHHHTQILTHSKLINFKNSIHIPSHKQILTSLILQLSPTNTIPPPPYPLTHLMLIQQTISNPQTLILNSKKIIILLNYTLPSFQPQNLLITPFFFFFILISMFVNLISLHAILRTIL

SEQ ID NO: 204927 - protein, 106 aa, Oryza sativa
  unsure (1)..(106): unsure at all Xaa locations
  Clone ID: PAT_MRT4530_99967C.1.pep
QVLPLVEDRNRCSSTRKQELVETKRKTLSMRGNPHEAHXLNPTTYAVSYCRIRLNRLTLSNSDSADPGRSRFGLQPIPLCFRNDLHLELHFNSFSTSDTWITKFGR

SEQ ID NO: 204928 - protein, 670 aa, Oryza sativa
  unsure (1)..(670): unsure at all Xaa locations
  Clone ID: PAT_MRT4530_99968C.1.pep
GNPRPTRAPRATTTDAANTTPHAGRAHTQQREPKKALQKQKKPKPVWEGGKRPPKTKGRAPREPSSPQKPQQTAARNTHPRNHHPTANNQSTTQPRRKHGARAAQRDRKGAKKDKTDKHPDAKHEDTNATRRRTRSRQGNGPSRAETPPPKTAPGQRQERTRHGKGTEDQRPRGPHAHRKTRAHTQTPGGQHATKTDRGRRSARTPRSRQPQQRERRHEHTTRSARKREQRRRQKSHTPRVDAHGARTRQRGEQRRMKTRQEEEGHKGRGGYETTAQRRTASRAASSDARTGMTASSRTTATSRARRERXATSSDRAQTRAAPDGEQYRXRRARRHXQPRAHGTDSRARRTENPDAHERRDMRQTRGTARRENRQARPDXQRVRMRGRSTKDGAEHATHDTAQTQQRAXSNXQRXAPMTASRDETGQTQTLMRGGRRNTVXSDEHNTTATRRAEAQRRSRARAAARRXXAGRDDAAPGRRDKTXARDSNDDSTERRRAPKSAAMHETQXEQTDADTAAPSTVXKRHTETDRHRRTQTRRGDARGADARARDRXQQRTRKRHEEERACDTXXXASTERANSPAATQERTRRSPRPRDTANXMHTSDATPPHERQRQGRRAANAQRRHAPQSARESVRTXARDANXTERRDQKRARERRQRGDSAPTREQQK

SEQ ID NO: 204929 - protein, 176 aa, Oryza sativa
  Clone ID: PAT_MRT4530_99969C.1.pep
ILGAGHRGVVAGGRVLPCPRSTPNPNLVAGSRILPRPRSTSELIAGDRILRRELVTGGRVRRPRLSRRPRPPRRSSSPVPLPSPHRILHRPRPTSELVAGAIFITNRILCRPCDHAPRRSSPAAASAPPVSASSALLPRRPALSRLREVERERSRWDSIPTGFRYIAAPVLLSTST

SEQ ID NO: 204930 - protein, 156 aa, Oryza sativa
  unsure (1)..(156): unsure at all Xaa locations
  Clone ID: PAT_MRT4530_9996C.1.pep
PPSSPSPSARIPLPLPTAAPHRRPNPXPRHQPICHIRRHKSPLPPIPPDQAPPLSSPYRRRRRPAGRCSRPSAHPFPSPHHRRNPRTTPVRTESNPIPISRVVSRAREVRGIVVPSXSHRPIRRRRDRRHPNPATPPRSPSPESCDAAGPFSRHRP

SEQ ID NO: 204931 - protein, 255 aa, Oryza sativa
  unsure (1)..(255): unsure at all Xaa locations
  Clone ID: PAT_MRT4530_99970C.1.pep
MPLGLPIVVVAIVAVASAGGGVPRSALSLTSTSMAATNDDAELTVAEAKEEEEATNNGGGVHSXWLRAVVLGTSDGLISTVSLMLGIXAAHTADERIVLLSGLAGLVAGACSMAXRRVRLRPRTTRCRAGQHSARARRXSCSPRSAAMTVPSVCPARLHTMATTASGGGGVSRPGQAATAATSXDTRRLLPAGCSCCLSSLWHGSSTAGGHGALRRKRSSAARRPLQVEGEKLPEEEEREGVFWSVEVGKMVKIL

SEQ ID NO: 204932 - protein, 644 aa, Oryza sativa
  Clone ID: PAT_MRT4530_99971C.1.pep
MLTSSLPPPTVPGSKPRPAAATSVSTAATADAAVAGGRSGSGSGSGIGRLSALIRSLCSAGRTAEAARALADAGDAAGVVAYNAMVAGYCRAGQLAAARRLAAAVPVPPNAYTFFPVVRGLCTRGRIADALEVLDEMSFKGCAPIPPMYHVILEAACRSGGFRNSVRVLEAMHAKGCTLDTGNCNLVLNAICEQGCVDEAVGLLRKLAFFGCEADIVSYNAVLKGLCMAKRWGDVEELMDEMVRVDCAPNIVTFNTLIGYLCRNGLFERVHEVLAQMSEHGCTPDIRMYATIIDGICKEGHLEVANEILNRMPSYGLKPNVVCYNTVLKGLCSAERWKEAEELLSEMFQKDCPLDDVTFNILVDFFCQNGLVDRVIELLEQMLSHGCMPDVITYTTVINGFCKEGLIDEAVMLLKSMSSCGCKPNTVSYTIVLKGLCSAGRWVDAEELMSQMIQQGCPPNPVTFNTLINFLCKKGLVEQAIELLKQMLVNGCSPDLISYSTVIDGLGKAGKTEEALELLNVMVNKGISPNTIIYSSIACALSREGRVNKVIQMFDNIKDTTIRSDAVLYNAVISSLCKRWETDRAIDFFAYMVSNGCMPNESTYTMLIKGLASEGLAKEAQELLSELCSRGALRKHLMRHFGIV

SEQ ID NO: 204933 - protein, 861 aa, Oryza sativa
  unsure (1)..(861): unsure at all Xaa locations
  Clone ID: PAT_MRT4530_99972C.1.pep
MASEEAARSHLSPRKHRRSPHDDDDAEDGASSPKRHKRGHHRHRHRVSPAAADPAEGEAEDGEILDQATAAVGVGVGRGLDADAEHRXTTLGNXPAPEHGDNSDADLNIHVNELHTSQLARNPSQEHDYPAKSDHAAHEAIVEYHSRRSPGSRNHNEAHSKDCLRSCHASRETGFQTDGSRNSVRLDYEHGIDDRHGEPDRYSNRRWETEERGCYKKRKKSGCHIGRHTDICNSEEKHLDERKHGSLVEKKVDLHGLAYHERRSGDGRFDQKASAHHGHGEGREMDRWNSSTRKKDEEWRNRKNDTARNSYKETDRVGSRYGEEKLNDSIDKRDKRGFRGKEMDACWSRAVNGNEGSISYTHANYGMSGIYKDGSSFGGDDTKAKCKRRPEEEKKEPYSKSSSNYVREEDEENYLENIEDRKQQEKSAHYIDNKEINNDPAATKQRSNNLRAKEDITNDHELSNVFVGAKFYNVRKSPTLPKISISLGTSDNKRATSASGLQEGSSRISHNKRTTSASGLQEGIPMRGKQVILGNVIDGEQPIDRKLGNENSMLAKKNTLHDNWEDEEGYYIYHFGEVLQGRYEITARRGKGVFSTVVHAKDLKAQKDGCREVAIKIICNNIEKYRSGKREISILEKLGTADREDKQHFLESLHMNLREVIKKFGHGTGLKLTAVRAYTKHIFIALKHLRHCGVLHCDIKPDNILVNKDNNLLKLCDFGSAMSAGNNEITPYLVSRFYRAPEIRKILFDGSTNNDMLRLHMELKGPFPKKMLRKGAFTMQHFDQNLNFLARKKDPITKTVVNRLLLNIKPKGVGSAISSCPGDDPKMISSFKDLLEKIFVLDPKKRITVPEALSHPFITGK

SEQ ID NO: 204934 - protein, 109 aa, Oryza sativa
  unsure (1)..(109): unsure at all Xaa locations
  Clone ID: PAT_MRT4530_99973C.1.pep
LTKPLIRLLVPARHLNRESSALSDPPSPKSFLDPLILNGSDADLEIGVGIRRPTSLRLLLASPTRSVHHYWRKFDXAFMRPVFGGRGFVPFVPGSPTERSVPLLQGNEN

SEQ ID NO: 204935 - protein, 528 aa, Oryza sativa
  Clone ID: PAT_MRT4530_99974C.1.pep
MHDANMAMSSRSLGALAAFVFLCSAASMSSSMAATDSFLQCLSASIPSQLLYTQSSPSYTSVLDAGIRNPKFLTNTTRPVWIITPTNASHVQAAVLCGRRNGVRLRIRSGGHDYEGLSYRSERPETFAVLDLVNIRAVRVDAASATAWVDSGATLGEMYYAIGKAGGRIAFPAGLCPTVGVGGHFSGGGFGMLLRKYGLAADNVVDAVLVDAKGRLLDKNSMGSDVFWALRGGAGESFGIVLSWKVKLVAVPPTVTVFNVPVTVSQGAIDVVTRWQAVAPSLPDDLFIRVLVQGQRASFQSLYLGTCDALLPVMRSRFPELGMNRSDCREMTWIQSVPYIYLGSSATVEDILNRTIAMDTSNKATSDYVRQAIGRDTWSAIFGWLARPNAGLMILDPYGGQIGSVAEAATPFPHRGGVLYNIQYMNFWSAAGGGGGGAAQRAWIRDFYAFMAPFVSKDPREAYANYRDLDLGENVVGAGGVSSYDAGKVWGEKYFRGNYQRLAMAKAQIDADDYFRNEQSIPPLVAGK

SEQ ID NO: 204936 - protein, 304 aa, Oryza sativa
  unsure (1)..(304): unsure at all Xaa locations
  Clone ID: PAT_MRT4530_99975C.1.pep
MNDIFLFNAMISDLSLVELPLKGRAFTWSNMQRSPLLEQLDWFFXSTAWTLKFPNTLVKPLARSTSDHTPCVVQIGTDIPKANIFRFENFCIKHEGFFELVQSIWQNHGHDSNSAKKXISVKVKALRKGLKRWSKSLSKLXLLIQNCNAVISFLDSIENLRDLTLLEWNFKVLIRNKLLMYLKYKQIYWQKRCTIRWAKFGGENTKFFHAMATESFRRNSIPSLVDLSGEICTCHDEKVSIVWIAFFARMGCTYFESMPFQLHQLFHSQDFLSCLDKPFGTSELDNIVMNLPIDTAPGAEGHRR

SEQ ID NO: 204937 - protein, 237 aa, Oryza sativa
  Clone ID: PAT_MRT4530_99976C.1.pep
MVVQEFTVDLNKPLVFQVGHLEERYQEWVHQPIVSKEGPRFFGNDVLEFLTRTKWFAVPTIWLPVVCWLLVKSIRMGHTIQEVGLMALFGIFIWTLIEYTLHRFLFHIETKTYWANTAHYLLHGCHHKHPMDSLRLVFPPTATAILCVPFWKLVAFFATPTITPALFGGGLLGYVMYDCTHYYLHHGQPSKEPAKNLKRYHLNHHFRIQNKGFGITSSLWDYVFGTLPPSKTTGKNN

SEQ ID NO: 204938 - protein, 479 aa, Oryza sativa
  Clone ID: PAT_MRT4530_99977C.1.pep
MGSAGAAPVATAAGGGGGDGDLHVVMFPFLAFGHISPFAQLARKMAGVGAGVRVTFLSAAANVPRVEAMLGGTGGTSTVAALELPRVPGLPEGAESTAEVSADGAELLKLAVDGTRPQVEALLARLHPDVVLFDFATPWVVDVARPLGVKAALFSVFAAVSGAYVMAPARRRLPGPGRPTVDDLASAPEGFPPSSPLATVPAYQAADFSYVFESFHGMPCVYDRVAACHNACDALVIKTCAEMEGPYIDYIAAEHGKPVLVTGPIVPEPPRGELEERWATWLSSFPDNSVVFASFGSETFLLHAAATELLLGLEATALPFLAVLNFPKGTDAEAELRKLTPPGLEERVKGRGILHTGWVQQQHILRHRSVGCFVNHSGLSSVVEGLVAGCRLVLLPMKGDQYLNAALFARELRVGTEVARRARDGWFGREDVRDALAAAFAGGEDGGGEEKKWREFLMDDAVQRRFVREFVAELRRLKG

SEQ ID NO: 204939 - protein, 276 aa, Oryza sativa
  Clone ID: PAT_MRT4530_99978C.1.pep
MEDLGGRRRSTVARYTRKSLPVGGERWEDLAGWLNQQGHQRHRGQCVDSSSCHARLVASARRRGGRHKAALRLTASARCHRGAVRRNPAARRRNDGGSARTCDDKHQQDGVLPRGFDRSIAQPDMVLHAGFRCEANELQPAAAGVTCHAAGFGHRIARFGRRQASGSKRSEVGGGMRQWARRGQPRCHGLEKAEVEYGGESRRLGWEPTRHGAGDAGEAEWGRNRAASTCIVFVFWKSATMTTRRDRQVSNSKDAATDRCILLQPLLLLFEFRANL

SEQ ID NO: 204940 - protein, 93 aa, Oryza sativa
  Clone ID: PAT_MRT4530_99979C.1.pep
MVGGAGVTRGRTGRTSGSTGEEAWRCGSRRVAPIDGSLPLRCGAVRCARVGGRRGFRPGKFAPGQQPNTLYVRDMSRVVEVENDIKVNKPLIW

SEQ ID NO: 204941 - protein, 160 aa, Oryza sativa
  unsure (1)..(160): unsure at all Xaa locations
  Clone ID: PAT_MRT4530_9997C.1.pep
HTYDEIKDDLTKEAPIGSDFIYESMGGXRLDSRSNALALNGLVMIIDMNCEHEWEPGCYTRLCTGLCDKSLAESETVVGHYLXSMLTSXHDHLDLLADLYAYGKLDAYLDPNKSVGAAAAPDADDYLNAGKSVXKVDACFDPTFSQTLAELYAVVMRYII

SEQ ID NO: 204942 - protein, 80 aa, Oryza sativa
  Clone ID: PAT_MRT4530_99980C.1.pep
MVNQPQNDSASGSGGGGAGGVLSFRIGGDRGDGGEPRFTSTATKAAATWISYYAPVPLDRSNSVRSVGTLLNQSMRAGMA

SEQ ID NO: 204943 - protein, 170 aa, Oryza sativa
  unsure (1)..(170): unsure at all Xaa locations
  Clone ID: PAT_MRT4530_99981C.1.pep
MYLAGEVAHRQRGRGRARAAAGWRAAAEEASATGCGGGGECGGRGQAPPPLATVPTPPPPLAALPPPLAALPPPLSHLPPLSLTXECPPLXARSTRAHPTALRSTRAVASSPWPSPCVPTLPPLRLYVVLNDTPPSPSSSISPSSPAAAASASPSSPAAAVASASPAAAA

SEQ ID NO: 204944 - protein, 48 aa, Oryza sativa
  Clone ID: PAT_MRT4530_99982C.1.pep
HSCDAILYCLNLSHLDCLNGLSARNHPSLTINLAAAMVAVVIEAMCLR

SEQ ID NO: 204945 - protein, 65 aa, Oryza sativa
  Clone ID: PAT_MRT4530_99983C.1.pep
MAEARDDLGRVVERLGWGQVARDGVNRRPEEEVRGGAYRRARRTELRWVPDDEKRTPDLPSSLRS

SEQ ID NO: 204946 - protein, 711 aa, Oryza sativa
  Clone ID: PAT_MRT4530_99984C.1.pep
MSLLVVLFFFFLSPPLAAAAAYTEYSCNGTRGNFTEGSAFGLNLELLAAELPANASSSRSLFASAAVGAAAAPEDRVFGLALCRGDMRDAAACAGCVSGAFQRLRALCGRDRDATYYHDLCVVRYSGDDFLSRPDDNSPVINALDANASTYYGWDGRNATTRSFFLSLVGTLFGEMAMYGSYNSSARRYASAVMYVNPQLPTVYGLAQCTPDLSPAQCWHCFQGLQEQNRQWYDGRQGGRILGVRCNFRYESYQFYAGTPDVRIGLQDVAPSPTANNGTNHRKTLVIVLSVSITVFCFMLVGCLLLIKKLRKGDGRKSNRQLEAHSRNSSKTEEALKLWRTEESSTDFTLYDFGDLAAATDNFSEDHRLGTGGFGPVYRATVNVDENADDLGELSDGAEIAVKRLAAQSGQGLKEFKNEIQLIAKLQHTNLVRLVGCCVQEEEKMLVYEYMPNRSLDFFIFDQEQGPLLDWKKRLHIIEGVVQGLLYLHKHSRVRIIHRDLKASNILLDKDLNPKISDFGMARIFGSNMTEANTNRVVGTYGYMAPEYASEGIFSVKSDVFSFGVLLLEIVSGKRNSGHQHYGEFVNLLGYAWQLWREERGCELIDPTLGECSGSEAAAIIRCVKVALLCVQDNATDRPTMTDVAAMLGSDGVPLPDPLPPPHYQLRVSGDDYDDGGRGSPAGGGFRPSRWRFTDSCSTNDVTITTIEEGR

SEQ ID NO: 204947 - protein, 200 aa, Oryza sativa
  Clone ID: PAT_MRT4530_99985C.1.pep
MEPSASASADPPRRSPWRHPSNGGNPNPNGDAVIDTTSWPALSEAARNPPKPPPCIDSPSEGQGKQSSRHKPARRGGAGADHSPSPRDDRATSWDHGRHHHHHNSGGRRGSFGGRRRGGGGGGFDALYRAPIGPYVRGATAPPPSPPSTKAFNTPLVRSSYDGTHWLQSGPCYDYKGFVRARVTNVLQFFDGGMLAGRTD

SEQ ID NO: 204948 - protein, 75 aa, Oryza sativa
  unsure (1)..(75): unsure at all Xaa locations
  Clone ID: PAT_MRT4530_99986C.1.pep
FFFFFFFFFFFFFFFFFXFXKKXXQLIXHSTXXXSISKLXQXNLTQTQPXXXREXSHDFTPKXWXXXPPKNSQQR

SEQ ID NO: 204949 - protein, 381 aa, Oryza sativa
  Clone ID: PAT_MRT4530_99987C.1.pep
MGCFAFKSKAKNQRAAASGARSPAPTSDGQKSKASSASTPTRSIQELSDERGAQRLRVFDLDELSSATNGFSRALKIGEGGFGSVYRAFFRSAAGGGGGRVVLAVKRLNQRSLQGHKQWLAEVQFLGVLEHPNLVRLVGYCAVDSETSKHRLLVYEFMPNKSLDDHLFNRAHPPLSWRLRLQIMIGAARGLDYLHEGLQEVQVIYRDFKAANVLLDADFKPKLSDFGLAREGPTEGKTHVSTAVVGTHGYAAPDYIETGHLTTKSDVWSFGVVLYEILTGRRSLERSRPAEEQKLLGWVRRHPPESQSFRSIMDPRLGGRYPAAAARQVARLADRCLVKNPKERPAMREVVEELERVLQMEPPTTTAADKDGDRRLPPAKR

SEQ ID NO: 204950 - protein, 36 aa, Oryza sativa
  unsure (1)..(36): unsure at all Xaa locations
  Clone ID: PAT_MRT4530_99988C.1.pep
FFYKSTYLNLTDELINVELRYAKLKVRSKQPTXTSD

SEQ ID NO: 204951 - protein, 363 aa, Oryza sativa
  Clone ID: PAT_MRT4530_99989C.1.pep
MARVVVFVVGGSCAASSVRILHYGAPSPSSERCSRYVRRDRSHRSFKPPFEDTAAYLHALDPTVQYRDKHSLETCYEPLFFFRKHPAVEFHHPIDAPDSMFDRVILTEWAKPAMRGVLETISSHHSANLELTEFSLKDLKIFCNYQTPEFKPRFKLVCGTRNATCEGMRMNYIQAGQIFKEIVNASLGTPSSWDILIEDFQDLLQMLENPILEEAYLMRNHPALLALKLHSQFFMACYETLMRASLQSVFEVFKMLPYGMNDSSGHWKVRLEQHPYLWWMLHSQFTSYGDRNSEQCRYRRNYSCHKIHHLTKRTERFKWYSANDVDMLLYQYLPMSLPGLMRAMWDEGLLALFCLRLDELFTK

SEQ ID NO: 204952 - protein, 119 aa, Oryza sativa
  Clone ID: PAT_MRT4530_9998C.1.pep
MTSAVTSSPATARVRMLAGERQRDGTNGGHLRNAGDTANLTEARTAADGDRTTTVTRMSGDDDRVDDDSDIPAVLGVVGGVDKVSGHSANTAVAFPSDEDDRSGGGAWLDELRRRRRTG

SEQ ID NO: 204953 - protein, 74 aa, Oryza sativa
  Clone ID: PAT_MRT4530_99990C.1.pep
DLLPAANYNPCKCRLNPSHKKKRRNDLGSTQTSLGTKRRTPSSPTPTRNQRGRARRSPPPRARRGRPARTPTSP

SEQ ID NO: 204954 - protein, 59 aa, Oryza sativa
  Clone ID: PAT_MRT4530_99991C.1.pep
FFFFFAELYSYLRAQLLLFFNIILIGGKWLFYVMIYLETSLESKAMIGFLGYGLTDMSW

SEQ ID NO: 204955 - protein, 70 aa, Oryza sativa
  Clone ID: PAT_MRT4530_99992C.1.pep
YEDNDGDRMLAGDIPWKVFVSTVKRLRVMRRSELPHDMTWVKWIHFLKLRSALNLFSSYVLPQIGADPVK

SEQ ID NO: 204956 - protein, 105 aa, Oryza sativa
  unsure (1)..(105): unsure at all Xaa locations
  Clone ID: PAT_MRT4530_99993C.1.pep
KVDLSKYTTAXQKLSSAVEELFRGFLEAQKDLFFAESGEQGAEDKIFSGLLDGTGVYTLVYEDNDGDRMLAGDIPWKVFVSTVKRLRVMRRSELPHDMIGADPVK

SEQ ID NO: 204957 - protein, 41 aa, Oryza sativa
  Clone ID: PAT_MRT4530_99994C.1.pep
RIELLDGSHWWVLWCRQCLVSTVTDQLVPRLLFPLSSANIV

SEQ ID NO: 204958 - protein, 133 aa, Oryza sativa
  Clone ID: PAT_MRT4530_99995C.1.pep
DLQKYDSYQKLSSAVEELFRGFLEAQKDLSCAESGEQGAEDKIFSGLLDGTGVYTLVYEDNDGDRMLAGDIPWKVFVSTVKRLRVMRRSELPHDYGKHRATSTGAIFLINSSAVSLVKLGSNGCTFVLYNTML

SEQ ID NO: 204959 - protein, 157 aa, Oryza sativa
  unsure (1)..(157): unsure at all Xaa locations
  Clone ID: PAT_MRT4530_99996C.1.pep
QSDLSGSRGAPASSXLPGGCHPRRREVAATEVEAEAAVRRRAPAVVGQRQPSSVDFLHDADPISPSAASPLSTPPLRGPPLQLAPTSAPAAARHHHSGLCPPPAEGDSEKEREKGGRGEEKERERMTCGAHKSVGPTIFYIHMGSRPSPCRKNCRGR

SEQ ID NO: 204960 - protein, 85 aa, Oryza sativa
  Clone ID: PAT_MRT4530_99997C.1.pep
MSSSLLPFLLGGGGGNWKAAVLQSLLSFVVEQEKSVVVLLSNLVRFAMDKVTGTSTVATGEAEAREDQDAGGKQQQSVIELARGF

SEQ ID NO: 204961 - protein, 534 aa, Oryza sativa
  unsure (1)..(534): unsure at all Xaa locations
  Clone ID: PAT_MRT4530_99998C.1.pep
MAEKPPQSPGTGVKPPATKPPGAKHPSPEVEASNVIPVTLDKLTSEQRQELEQMMSSVKDKFMNSFKETRQGTIIQKYKLKVVAADEARTSSSQGGKGAVDASGDKGDGLQDGVVEDLGEDGAEVQEEPPRCTNFQDQVDYAVQHALFNQSGVLVNTLTNMIKSVIDGTIAEHQTTGPIYLSGGVFPNYRNREQFGLKPNDTGNLYRQPYPEWFERVPLPNRYKVPNFSKFSGQDNISTYEHVSRFLAQCGEASAVDALRVRLFPLSLSGTTFTWFSSLXTILFKGLIALIKEKFSSQEFESLSHLAQXEDDFEVAAAEWVRSKKVVQCQWVKNSGKEERFCWNEGMRLPSIGDCLGCSNNAGCSSQSYSRSNRLSQKRVPVHQRLGPVNQDRYQDDDEDRKIQWCPSGIFTKNQKRRVQRMRNRERFQEVEQEINHRLKKTKPRQEWRVKSKIATADETEADKAKRLAKGKSVASASVNMVFVLPAEYEAKQADVDDVEEASARLILLPEQAILEKQDFGPALKLNRSSRPSS

SEQ ID NO: 204962 - protein, 133 aa, Oryza sativa
  Clone ID: PAT_MRT4530_99999C.1.pep
CNITKNPQQNPPLYSSIPAILAVAGICDGDGRRGHRQVWATARGGLLLAPPRTAAPSGGRDAGSSRRRPTPTPIRRPTTLPRAGSGARRPPSRRRRTQPLSSLSLRRGPRPTSTAFTFIDNNDRAPSRSPWEV

SEQ ID NO: 204963 - protein, 431 aa, Oryza sativa
  Clone ID: PAT_MRT4530_9999C.1.pep
LAGWFKPCKRYAPLFELTACSYYCPPPMPPPAPPPNPPPPPAPPPPAPWPPPTPPPKPPPLPPPKPPPAPAPPPPPNPPPAPPPTPPPLPPPKPPPKPPPLPPPKPPPAPAPPPPPPPPPKPPPLPPPKPPPAPAPPPAPPPIPPPPPAPPPAPRPPPAPAPPPAPPPTPAPPPAPPPRPPPPPWPPPAPPPRPPPPPAPPPAPPPRPPPPPAPPPAPPPTPAPPPAPPPRPPPPPEPPPRPPPAPPPAPPPRPPPPPAPPPAPAPPPTPAPAPPPAPPPRPPPAPPPPPPPRPPPPPRPPPFPPPNPPPTPPPCPIPPPTPTPPPKPPPFPPPNPPPMPPPWPRPPPAPPPNPPPPPTPTPPPLPPPNPIPTPPPWPTPPPPPKPPPPPKPSLSKRRASAATTPRANNDTRANAAARLPIPITIYISDVQ

SEQ ID NO: 204964 - protein, 897 aa, Oryza sativa
  Clone ID: PAT_MRT4530_999C.1.pep
MPSGYRPDRETDFAGFPSTTPIVIDNGASTFRIGWAGEAEPRVAFRNIVQRPRHRSSGETVTVVGDTDPALMKYFDCTRSAIRSPFDDDVVYQFEYMEYILDFGFDRLGATSEVGHPILMTECECNPSFSRARMSELLFETYGVPSIGNDTYLFVPLLSIVHGSFEVRIVDAKDVSSYFLKGEPVLGACCRTNVGGFHITDFLRQLLSLKYPYHSASITWEKAEELKKEHCYVALDYMSELQIFKNNKEEAEEKTRYWQLPWVPPPVEEPPSEEELARKAALKEKAGQRLRDMAAAKRSQKIAELEKQLSYLEELMEQLDGAEEEEATAILGRSGYLSQQEIKSAILKATQSLRKAKGESNGNEEKADASGVDKYPLVSVPDETLTPEQLKEKKKQILLKTTTEGRMRAKQRRAEEEALREKQEEERRLENPELYLEELRARYSELSDRVDQRKRQKLNGGKTNGNHNSSGGVGRGERLNAAQKERMRLLTSAAFDRGKGEDTFGTRDEDWLVYKKMSKDNDDDDDGNDDDESELARIASKIQDMDPTFVNKAEAVQQTPEPPKVRTLTAEDYRISIGIERFRCPEILFQPGMIGIDQAGIDEMVSISLRRLMEDEAVKERLCQSILVTGGCSLIPGMIPRLESGIRQFRPYLSPLKLVRAADPLIDAWRGAAAFAASSKFGRHTFSLADYREHGENLFHRKLKRGISTKRGDHPVQNGQNPVDEWEEQQRYWPSPRAPPVSPMGSPRTPNGSQKKPVLGKVKSKAKKWMHLLHHKKKPQEDMMWTPRAGPSADDSKEHNDADYGSPSTARHPHSSCESACAPEVFLEASSRQNSPLPSPTAHKEQPYFKVSSRFESEMKEANEMLRESKQLPCQHNQTEDCNICANLRTGARTCKK

SEQ ID NO: 204965 - protein, 302 aa, Oryza sativa
  Clone ID: PAT_MRT4530_99C.1.pep
MEILDRFCLVAFLPATPTQLVVAEAKQTDSQDKSVISAVPTVSAAASAFRARLSLRRRHGGLAGGDFSAQIQPTLSSTRPNPQPTTSASVQSLLPLGHDTDEIVVEGFDEISRRLGSTYSGFVNYGMIRVREEIKDDEERGEGTKKTVRREEREEEGVRMTYRLHWESRPIQGPEDTAHYSTPTSRAPPRRPPRRRSQPLLVDSKLGSGESRRRITAAAAARRFDLRSRHLAARIPMARLHWLEAMLPLGIIGGMLCIMGNAQYYIHRAAHGRPKHIGNDNWDMAMARRDKVLLHQASSENN

SEQ ID NO: 204966 - protein, 75 aa, Oryza sativa
  Clone ID: PAT_MRT4530_9C.1.pep
MLINNVVPLYSGSYVSPREGGKYMLSRANVIFTEAHFSLKTSGTPELLSLLITLRSERMGTRVHGTLDTIKHLGF
